(19) United States
(12) Patent Application Publication
(10) Pub. No.: US 2026/0021195 A1
(43) Pub. Date: Jan. 22, 2026

(54) RNAI AGENTS FOR INHIBITING EXPRESSION OF HUNTINGTIN (HTT), COMPOSITIONS THEREOF, AND METHODS OF USE

(71) Applicant: ARROWHEAD PHARMACEUTICALS, INC., Pasadena, CA (US)

(72) Inventors: Christine ESAU, San Diego, CA (US); Tao PEI, Middleton, WI (US); Xiaokai LI, San Diego, CA (US); Ivar STEIN, San Diego, CA (US); George NACLERIO, III, Madison, WI (US); Ji Young SUK, San Diego, CA (US)

(21) Appl. No.: 19/244,201

(22) Filed: Jun. 20, 2025

Related U.S. Application Data
(60) Provisional application No. 63/662,268, filed on Jun. 20, 2024.
(60) Provisional application No. 63/703,377, filed on Oct. 4, 2024.
(60) Provisional application No. 63/743,015, filed on Jan. 8, 2025.

(51) Int. Cl. A61K 47/68; C07K 16/18; C12N 15/113

(52) U.S. Cl. CPC A61K 47/6807; A61K 47/6843; C07K 16/18; C12N 15/113; C07K 2317/55; C12N 2310/11; C12N 2310/31; C12N 2310/351

(57) ABSTRACT

Described are RNAi agents, compositions that include RNAi agents, and methods for inhibition of a huntingtin (HTT) gene. The HTT RNAi agents and RNAi agent conjugates disclosed herein inhibit the expression of an HTT gene. The HTT RNAi agents are conjugated to an antigen binding protein that may enable subcutaneous delivery of the RNAi agents by facilitating crossing of the blood brain barrier (BBB). Pharmaceutical compositions that include one or more HTT RNAi agents, optionally with one or more additional therapeutics, are also described. Delivery of the described HTT RNAi agents to central nervous system (CNS) tissue, in vivo, provides for inhibition of HTT gene expression and a reduction in HTT activity, which can provide a therapeutic benefit to subjects, including human subjects, for the treatment of various diseases including Huntington's Disease.

### CROSS REFERENCE TO RELATED APPLICATIONS

[0001] This application claims the benefit of priority to U.S. Provisional Patent Application Ser. No. 63/662,268, filed on Jun. 20, 2024, U.S. Provisional Patent Application Ser. No. 63/703,377, filed on Oct. 4, 2024, and U.S. Provisional Patent Application Ser. No. 63/743,015, filed on Jan. 8, 2025, the contents of each of which are incorporated herein by reference in their entirety.

### FIELD OF THE INVENTION

[0002] The present disclosure relates to RNA interference (RNAi) agents, e.g., double stranded RNAi agents such as chemically modified small interfering RNAs (siRNAs), for inhibition of huntingtin (“HTT”) gene expression, compositions that include HTT RNAi agents, and methods of use thereof.

### SEQUENCE LISTING

[0003] This application contains a Sequence Listing (in compliance with Standard ST26), which has been submitted in xml format and is hereby incorporated by reference in its entirety. The xml sequence listing file is named 4140_1380003_SequenceListing_ST26.xml, created Jun. 20, 2025, and is 5,134,314 bytes in size.

### BACKGROUND

[0004] The present disclosure relates to RNA interference (RNAi) agents, e.g., double stranded RNAi agents such as chemically modified small interfering RNAs (siRNAs), for inhibition of huntingtin (“HTT”) gene expression, compositions that include HTT RNAi agents, and methods of use thereof.

[0005] Huntington's disease causes nerve cells in the brain to decay over time, affecting a person's movements, thinking ability, and mental health. This disease is inherited in autosomal dominant pattern. 2024 Mayo Foundation for Medical Education and Research (MFMER). Huntington's disease affects approximately 3 to 7 per 100,000 people of European ancestry. MedlinePlus, National Library of Medicine, 2024.

[0006] Huntington's disease (HD) is a neurodegenerative disorder caused by an expanded CAG (cytosine, adenine, and guanine) trinucleotide repeat in the huntingtin (HTT) gene. Normal healthy individuals have 10-35 CAG repeats within the HTT gene. Mutant HTT genes contain 36 to more than 120 CAG repeats. The increase in CAG repeats results in the expression of an mutant HTT protein with an abnormally long poly-glutamine tract that leads to the formation of toxic aggregates in neurons. This leads to disruption of normal cellular function. There are treatments that can reduce the severity of some symptoms of Huntington's disease, but currently there are no treatments that can alter the course of the disease. Treatments to reduce the expression of mutant HTT protein are likely to provide long-term management of the disease.

### SUMMARY

[0007] There exists a need for novel RNA interference (RNAi) agents (termed RNAi agents, RNAi triggers, or triggers), e.g., double stranded RNAi agents such as siRNAs, that are able to selectively and efficiently inhibit the expression of a mutant HTT gene, including for use as a therapeutic or medicament. Further, there exists a need for compositions of novel HTT-specific RNAi agents for the treatment of diseases or disorders associated mutant HTT gene expression and/or disorders that can be mediated at least in part by a reduction in HTT gene expression.

[0008] The nucleotide sequences and chemical modifications of the HTT RNAi agents disclosed herein, as well as their combination with certain specific antigen binding proteins suitable for selectively and efficiently delivering the HTT RNAi agents to relevant CNS cells in vivo, differ from those previously disclosed or known in the art. The HTT RNAi agents disclosed herein provide for highly potent and efficient inhibition of the expression of an HTT gene.

[0009] In general, the present disclosure features HTT gene-specific RNAi agents, compositions that include HTT RNAi agents, and methods for inhibiting expression of an HTT gene in vitro and/or in vivo using the HTT RNAi agents and compositions that include HTT RNAi agents described herein. The HTT RNAi agents described herein are able to selectively and efficiently decrease expression of an HTT gene, and thereby reduce the expression of the HTT protein.

[0010] The described HTT RNAi agents can be used in methods for therapeutic treatment (including preventative or prophylactic treatment) of symptoms and diseases including, but not limited to, various central nervous system diseases and neurodegenerative diseases (including Huntington's Disease).

[0011] In one aspect, the disclosure features RNAi agents for inhibiting expression of an HTT gene, wherein the RNAi agent includes a sense strand (also referred to as a passenger strand) and an antisense strand (also referred to as a guide strand). The sense strand and the antisense strand can be partially, substantially, or fully complementary to each other. The length of the RNAi agent sense strands described herein each can be 15 to 49 nucleotides in length. The length of the RNAi agent antisense strands described herein each can be 18 to 49 nucleotides in length. In some embodiments, the sense and antisense strands are independently 18 to 26 nucleotides in length. The sense and antisense strands can be either the same length or different lengths. In some embodiments, the sense and antisense strands are independently 21 to 26 nucleotides in length. In some embodiments, the sense and antisense strands are independently 21 to 24 nucleotides in length. In some embodiments, both the sense strand and the antisense strand are 21 nucleotides in length. In some embodiments, the antisense strands are independently 18, 19, 20, 21, 22, 23, 24, 25, 26, 27, 28, 29, or 30 nucleotides in length. In some embodiments, the sense strands are independently 16, 17, 18, 19, 20, 21, 22, 23, 24, 25, 26, 27, 28, 29, 30, 31, 32, 33, 34, 35, 36, 37, 38, 39, 40, 41, 42, 43, 44, 45, 46, 47, 48, or 49 nucleotides in length. The RNAi agents described herein, upon delivery to a cell expressing HTT such as endothelial cells, neurons, microglia, and astrocytes, inhibit the expression of one or more HTT gene variants in vivo and/or in vitro.

[0012] The HTT RNAi agents disclosed herein target a human HTT gene (see, e.g., SEQ ID NO: 1). In some embodiments, the HTT RNAi agents disclosed herein target a portion of an HTT gene having the sequence of any of the sequences disclosed in Table 1.

[0013] In another aspect, the disclosure features compositions, including pharmaceutical compositions, that include one or more of the disclosed HTT RNAi agents that are able to selectively and efficiently decrease expression of an HTT gene. The compositions that include one or more HTT RNAi agents described herein can be administered to a subject, such as a human or animal subject, for the treatment (including prophylactic treatment or inhibition) of symptoms and diseases associated with HTT protein or enzyme levels.

[0014] Examples of HTT RNAi agent sense strands and antisense strands that can be used in an HTT RNAi agent are provided in Tables 3, 4, 5, and 6. Examples of HTT RNAi agent duplexes are provided in Tables 7, 8, and 9. Examples of 19-nucleotide core stretch sequences that may consist of or may be included in the sense strands and antisense strands of certain HTT RNAi agents disclosed herein, are provided in Table 2.

[0015] In another aspect, the disclosure features methods for delivering HTT RNAi agents to neurons, astrocytes, microglia and endothelial cells in a subject, such as a mammal, in vivo. Also described herein are compositions for use in such methods. In some embodiments, disclosed herein are methods for delivering HTT RNAi agents to central nervous system cells (neurons, astrocytes, microglia and endothelial cells) to a subject in vivo. In some embodiments, the subject is a human subject.

[0016] The methods disclosed herein include the administration of one or more HTT RNAi agents to a subject, e.g., a human or animal subject, by any suitable means known in the art. The pharmaceutical compositions disclosed herein that include one or more HTT RNAi agents can be administered in a number of ways depending upon whether local or systemic treatment is desired. Administration can be, but is not limited to, for example, intravenous, intraarterial, subcutaneous, intraperitoneal, subdermal (e.g., via an implanted device), and intraparenchymal administration. In some embodiments, the pharmaceutical compositions described herein are administered by intrathecal injection, intracerebroventricular injection, or subcutaneous injection.

[0017] In some embodiments, it is desired that the HTT RNAi agents described herein inhibit the expression of an HTT gene in central nervous system cells.

[0018] The one or more HTT RNAi agents can be delivered to target cells or tissues using any oligonucleotide delivery technology known in the art. In some embodiments, an HTT RNAi agent is delivered to cells or tissues by covalently linking the RNAi agent to a targeting group or an antigen binding protein.

[0019] An antigen binding protein can be linked to the 3′ or 5′ end of a sense strand or an antisense strand of an HTT RNAi agent. In some embodiments, an antigen binding protein is linked to the 3′ or 5′ end of the sense strand. In some embodiments, an antigen binding protein is linked to the 5′ end of the sense strand. In some embodiments, an antigen binding protein is linked internally to a nucleotide on the sense strand and/or the antisense strand of the RNAi agent. In some embodiments, an antigen binding protein is linked to the RNAi agent via a linker.

[0020] In another aspect, the disclosure features compositions that include one or more HTT RNAi agents that have the duplex structures disclosed in Tables 7, 8, and 9.

[0021] The use of HTT RNAi agents provides methods for therapeutic (including prophylactic) treatment of diseases or disorders for which a reduction in HTT protein levels can provide a therapeutic benefit. The HTT RNAi agents disclosed herein can be used to treat various neurodegenerative diseases, including Huntington's Disease. Such methods of treatment include administration of an HTT RNAi agent to a human being or animal having elevated or mutant HTT protein or mutant HTT activity beyond desirable levels.

### BRIEF DESCRIPTION OF THE DRAWINGS

[0022] FIG. 1. Shows the chemical structure of AC007867 in free acid form.

[0023] FIG. 2. Shows the chemical structure of AC007867 in free base form.

### DETAILED DESCRIPTION

### Definitions

[0024] As used herein, the terms “oligonucleotide” and “polynucleotide” mean a polymer of linked nucleosides each of which can be independently modified or unmodified.

[0025] As used herein, an “RNAi agent” (also referred to as an “RNAi trigger”) means a chemical composition of matter that contains an RNA or RNA-like (e.g., chemically modified RNA) oligonucleotide molecule that is capable of degrading or inhibiting (e.g., degrades or inhibits under appropriate conditions) translation of messenger RNA (mRNA) transcripts of a target mRNA in a sequence specific manner. As used herein, RNAi agents may operate through the RNA interference mechanism (i.e., inducing RNA interference through interaction with the RNA interference pathway machinery (RNA-induced silencing complex or RISC) of mammalian cells), or by any alternative mechanism(s) or pathway(s). While it is believed that RNAi agents, as that term is used herein, operate primarily through the RNA interference mechanism, the disclosed RNAi agents are not bound by or limited to any particular pathway or mechanism of action. RNAi agents disclosed herein are comprised of a sense strand and an antisense strand, and include, but are not limited to: small (or short) interfering RNAs (siRNAs), double stranded RNAs (dsRNA), micro RNAs (miRNAs), short hairpin RNAs (shRNA), and dicer substrates. The antisense strand of the RNAi agents described herein is at least partially complementary to the mRNA being targeted (i.e. HTT mRNA). RNAi agents can include one or more modified nucleotides and/or one or more non-phosphodiester linkages.

[0026] As used herein, the terms “silence,” “reduce,” “inhibit,” “down-regulate,” or “knockdown” when referring to expression of a given gene, mean that the expression of the gene, as measured by the level of RNA transcribed from the gene or the level of polypeptide, protein, or protein subunit translated from the mRNA in a cell, group of cells, tissue, organ, or subject in which the gene is transcribed, is reduced when the cell, group of cells, tissue, organ, or subject is treated with the RNAi agents described herein as compared to a second cell, group of cells, tissue, organ, or subject that has not or have not been so treated.

[0027] As used herein, the terms “sequence” and “nucleotide sequence” mean a succession or order of nucleobases or nucleotides, described with a succession of letters using standard nomenclature.

[0028] As used herein, a “base,” “nucleotide base,” or “nucleobase,” is a heterocyclic pyrimidine or purine compound that is a component of a nucleotide, and includes the primary purine bases adenine and guanine, and the primary pyrimidine bases cytosine, thymine, and uracil. A nucleobase may further be modified to include, without limitation, universal bases, hydrophobic bases, promiscuous bases, size-expanded bases, and fluorinated bases. (See, e.g., Modified Nucleosides in Biochemistry, Biotechnology and Medicine, Herdewijn, P. ed. Wiley-VCH, 2008). The synthesis of such modified nucleobases (including phosphoramidite compounds that include modified nucleobases) is known in the art.

[0029] As used herein, and unless otherwise indicated, the term “complementary,” when used to describe a first nucleobase or nucleotide sequence (e.g., RNAi agent sense strand or targeted mRNA) in relation to a second nucleobase or nucleotide sequence (e.g., RNAi agent antisense strand or a single-stranded antisense oligonucleotide), means the ability of an oligonucleotide or polynucleotide including the first nucleotide sequence to hybridize (form base pair hydrogen bonds under mammalian physiological conditions (or otherwise suitable in vivo or in vitro conditions)) and form a duplex or double helical structure under certain standard conditions with an oligonucleotide that includes the second nucleotide sequence. The person of ordinary skill in the art would be able to select the set of conditions most appropriate for a hybridization test. Complementary sequences include Watson-Crick base pairs or non-Watson-Crick base pairs and include natural or modified nucleotides or nucleotide mimics, at least to the extent that the above hybridization requirements are fulfilled. Sequence identity or complementarity is independent of modification. For example, a and Af, as defined herein, are complementary to U (or T) and identical to A for the purposes of determining identity or complementarity.

[0030] As used herein, “perfectly complementary” or “fully complementary” means that in a hybridized pair of nucleobase or nucleotide sequence molecules, all (100%) of the bases in a contiguous sequence of a first oligonucleotide will hybridize with the same number of bases in a contiguous sequence of a second oligonucleotide. The contiguous sequence may comprise all or a part of a first or second nucleotide sequence.

[0031] As used herein, “partially complementary” means that in a hybridized pair of nucleobase or nucleotide sequence molecules, at least 70%, but not all, of the bases in a contiguous sequence of a first oligonucleotide will hybridize with the same number of bases in a contiguous sequence of a second oligonucleotide. The contiguous sequence may comprise all or a part of a first or second nucleotide sequence.

[0032] As used herein, “substantially complementary” means that in a hybridized pair of nucleobase or nucleotide sequence molecules, at least 85%, but not all, of the bases in a contiguous sequence of a first oligonucleotide will hybridize with the same number of bases in a contiguous sequence of a second oligonucleotide. The contiguous sequence may comprise all or a part of a first or second nucleotide sequence.

[0033] As used herein, the terms “complementary,” “fully complementary,” “partially complementary,” and “substantially complementary” are used with respect to the nucleobase or nucleotide matching between the sense strand and the antisense strand of an RNAi agent, or between the antisense strand of an RNAi agent and a sequence of an HTT mRNA.

[0034] As used herein, the term “substantially identical” or “substantial identity,” as applied to a nucleic acid sequence means the nucleotide sequence (or a portion of a nucleotide sequence) has at least about 85% sequence identity or more, e.g., at least 90%, at least 95%, or at least 99% identity, compared to a reference sequence. Percentage of sequence identity is determined by comparing two optimally aligned sequences over a comparison window. The percentage is calculated by determining the number of positions at which the same type of nucleic acid base occurs in both sequences to yield the number of matched positions, dividing the number of matched positions by the total number of positions in the window of comparison and multiplying the result by 100 to yield the percentage of sequence identity. In some embodiments, sequence identity, as applicable to a particular nucleotide or amino acid sequence, is calculated by a pairwise alignment using the Needleman-Wunsch algorithm using a generally available alignment program, e.g., the Needle (EMBOSS) program. The inventions disclosed herein encompass nucleotide sequences substantially identical to those disclosed herein. In particular embodiments, a nucleic acid sequence is 99% identical to a nucleotide sequence disclosed herein. In particular embodiments, a nucleic acid is 95% identical to a nucleotide sequence disclosed herein. In particular embodiments, an amino acid sequence is 99% identical to a polypeptide sequence disclosed herein. In particular embodiments, an amino acid is 95% identical to a polypeptide sequence disclosed herein. As used herein, the terms “treat,” “treatment,” and the like, mean the methods or steps taken to provide relief from or alleviation of the number, severity, and/or frequency of one or more symptoms of a disease in a subject. As used herein, “treat” and “treatment” may include the prevention, management, prophylactic treatment, and/or inhibition or reduction of the number, severity, and/or frequency of one or more symptoms of a disease in a subject.

[0035] As used herein, the phrase “introducing into a cell,” when referring to an RNAi agent, means functionally delivering the RNAi agent into a cell. The phrase “functional delivery,” means delivering the RNAi agent to the cell in a manner that enables the RNAi agent to have the expected biological activity, e.g., sequence-specific inhibition of gene expression.

[0036] Unless stated otherwise, use of the symbol

[chemical structure]

as used herein means that any group or groups may be linked thereto that is in accordance with the scope of the inventions described herein.

[0037] As used herein, the term “isomers” refers to compounds that have identical molecular formulae, but that differ in the nature or the sequence of bonding of their atoms or in the arrangement of their atoms in space. Isomers that differ in the arrangement of their atoms in space are termed “stereoisomers.” Stereoisomers that are not mirror images of one another are termed “diastereoisomers,” and stereoisomers that are non-superimposable mirror images are termed “enantiomers,” or sometimes optical isomers. A carbon atom bonded to four non identical substituents is termed a “chiral center.”

[0038] As used herein, unless specifically identified in a structure as having a particular conformation, for each structure in which asymmetric centers are present and thus give rise to enantiomers, diastereomers, or other stereoisomeric configurations, each structure disclosed herein is intended to represent all such possible isomers, including their optically pure and racemic forms. For example, the structures disclosed herein are intended to cover mixtures of diastereomers as well as single stereoisomers.

[0039] As used in a claim herein, the phrase “consisting of” excludes any element, step, or ingredient not specified in the claim. When used in a claim herein, the phrase “consisting essentially of” limits the scope of a claim to the specified materials or steps and those that do not materially affect the basic and novel characteristic(s) of the claimed invention.

[0040] The person of ordinary skill in the art would readily understand and appreciate that the compounds and compositions disclosed herein may have certain atoms (e.g., N, O, or S atoms) in a protonated or deprotonated state, depending upon the environment in which the compound or composition is placed. Accordingly, as used herein, the structures disclosed herein envisage that certain functional groups, such as, for example, OH, SH, or NH, may be protonated or deprotonated. The disclosure herein is intended to cover the disclosed compounds and compositions regardless of their state of protonation based on the environment (such as pH), as would be readily understood by the person of ordinary skill in the art. Correspondingly, compounds described herein with labile protons or basic atoms should also be understood to represent salt forms of the corresponding compound. Compounds described herein may be in a free acid, free base, or salt form. Pharmaceutically acceptable salts of the compounds described herein should be understood to be within the scope of the invention.

[0041] As used herein, the term “linked” or “conjugated” when referring to the connection between two compounds or molecules means that two compounds or molecules are joined by a covalent bond. Unless stated, the terms “linked” and “conjugated” as used herein may refer to the connection between a first compound and a second compound either with or without any intervening atoms or groups of atoms.

[0042] As used herein, the term “including” is used to herein mean, and is used interchangeably with, the phrase “including but not limited to.” The term “or” is used herein to mean, and is used interchangeably with, the term “and/or,” unless the context clearly indicates otherwise.

[0043] Unless otherwise defined, all technical and scientific terms used herein have the same meaning as commonly understood by one of ordinary skill in the art. Although methods and materials similar or equivalent to those described herein can be used in the practice or testing of the present invention, suitable methods and materials are described below. All publications, patent applications, patents, and other references mentioned herein are incorporated by reference in their entirety. In case of conflict, the present specification, including definitions, will control. In addition, the materials, methods, and examples are illustrative only and not intended to be limiting.

[0044] Other objects, features, aspects, and advantages of the invention will be apparent from the following detailed description, accompanying figures, and from the claims.

### RNAi Agents

[0045] Described herein are RNAi agents for inhibiting expression of the huntingtin (or HTT) gene (referred to herein as HTT RNAi agents or HTT RNAi triggers). Each HTT RNAi agent disclosed herein comprises a sense strand and an antisense strand. The sense strand can be 15 to 49 nucleotides in length. The antisense strand can be 18 to 30 nucleotides in length. The sense and antisense strands can be either the same length or they can be different lengths. In some embodiments, the sense and antisense strands are each independently 18 to 27 nucleotides in length. In some embodiments, both the sense and antisense strands are each 21-26 nucleotides in length. In some embodiments, the sense and antisense strands are each 21-24 nucleotides in length. In some embodiments, the sense and antisense strands are each independently 19-21 nucleotides in length. In some embodiments, the sense strand is about 19 nucleotides in length while the antisense strand is about 21 nucleotides in length. In some embodiments, the sense strand is about 21 nucleotides in length while the antisense strand is about 23 nucleotides in length. In some embodiments, a sense strand is 23 nucleotides in length and an antisense strand is 21 nucleotides in length. In some embodiments, both the sense and antisense strands are each 21 nucleotides in length. In some embodiments, the RNAi agent sense strands are each independently 15, 16, 17, 18, 19, 20, 21, 22, 23, 24, 25, 26, 27, 28, 29, 30, 31, 32, 33, 34, 35, 36, 37, 38, 39, 40, 41, 42, 43, 44, 45, 46, 47, 48, or 49 nucleotides in length. In some embodiments, the RNAi agent antisense strands are each independently 18, 19, 20, 21, 22, 23, 24, 25, 26, 27, 28, 29, or 30 nucleotides in length. In some embodiments, a double-stranded RNAi agent has a duplex length of about 16, 17, 18, 19, 20, 21, 22, 23, or 24 nucleotides.

[0046] Examples of nucleotide sequences used in forming HTT RNAi agents are provided in Tables 2, 3, 4, 5, 6, and 9. Examples of RNAi agent duplexes, that include the sense strand and antisense strand sequences in Tables 2, 3, 4, 5, 6, are shown in Tables 7, 8, and 9.

[0047] In some embodiments, the region of perfect, substantial, or partial complementarity between the sense strand and the antisense strand is 16-26 (e.g., 16, 17, 18, 19, 20, 21, 22, 23, 24, 25, or 26) nucleotides in length and occurs at or near the 5′ end of the antisense strand (e.g., this region may be separated from the 5′ end of the antisense strand by 0, 1, 2, 3, or 4 nucleotides that are not perfectly, substantially, or partially complementary).

[0048] A sense strand of the HTT RNAi agents described herein includes at least 15 consecutive nucleotides that have at least 85% identity to a core stretch sequence (also referred to herein as a “core stretch” or “core sequence”) of the same number of nucleotides in an HTT mRNA. In some embodiments, a sense strand core stretch sequence is 100% (perfectly) complementary or at least about 85% (substantially) complementary to a core stretch sequence in the antisense strand, and thus the sense strand core stretch sequence is typically perfectly identical or at least about 85% identical to a nucleotide sequence of the same length (sometimes referred to, e.g., as a target sequence) present in the HTT mRNA target. In some embodiments, this sense strand core stretch is 15, 16, 17, 18, 19, 20, 21, 22, or 23 nucleotides in length. In some embodiments, this sense strand core stretch is 17 nucleotides in length. In some embodiments, this sense strand core stretch is 19 nucleotides in length.

[0049] An antisense strand of an HTT RNAi agent described herein includes at least 16 consecutive nucleotides that have at least 85% complementarity to a core stretch of the same number of nucleotides in an HTT mRNA and to a core stretch of the same number of nucleotides in the corresponding sense strand. In some embodiments, an antisense strand core stretch is 100% (perfectly) complementary or at least about 85% (substantially) complementary to a nucleotide sequence (e.g., target sequence) of the same length present in the HTT mRNA target. In some embodiments, this antisense strand core stretch is 16, 17, 18, 19, 20, 21, 22, or 23 nucleotides in length. In some embodiments, this antisense strand core stretch is 19 nucleotides in length. In some embodiments, this antisense strand core stretch is 17 nucleotides in length. A sense strand core stretch sequence can be the same length as a corresponding antisense core sequence or it can be a different length.

[0050] The HTT RNAi agent sense and antisense strands anneal to form a duplex. A sense strand and an antisense strand of an HTT RNAi agent can be partially, substantially, or fully complementary to each other. Within the complementary duplex region, the sense strand core stretch sequence is at least 85% complementary or 100% complementary to the antisense core stretch sequence. In some embodiments, the sense strand core stretch sequence contains a sequence of at least 16, at least 17, at least 18, at least 19, at least 20, at least 21, at least 22, or at least 23 nucleotides that is at least 85% or 100% complementary to a corresponding 16, 17, 18, 19, 20, 21, 22, or 23 nucleotide sequence of the antisense strand core stretch sequence (i.e., the sense and antisense core stretch sequences of an HTT RNAi agent have a region of at least 16, at least 17, at least 18, at least 19, at least 20, at least 21, at least 22, or at least 23 nucleotides that is at least 85% base paired or 100% base paired.)

[0051] In some embodiments, the antisense strand of an HTT RNAi agent disclosed herein differs by 0, 1, 2, or 3 nucleotides from any of the antisense strand sequences in Table 2 or Table 3. In some embodiments, the sense strand of an HTT RNAi agent disclosed herein differs by 0, 1, 2, or 3 nucleotides from any of the sense strand sequences in Table 2, Table 4, Table 5, Table 6, or Table 9.

[0052] In some embodiments, the sense strand and/or the antisense strand can optionally and independently contain an additional 1, 2, 3, 4, 5, or 6 nucleotides (extension) at the 3′ end, the 5′ end, or both the 3′ and 5′ ends of the core stretch sequences. The antisense strand additional nucleotides, if present, may or may not be complementary to the corresponding sequence in the HTT mRNA. The sense strand additional nucleotides, if present, may or may not be identical to the corresponding sequence in the HTT mRNA. The antisense strand additional nucleotides, if present, may or may not be complementary to the corresponding sense strand's additional nucleotides, if present.

[0053] As used herein, an extension comprises 1, 2, 3, 4, 5, or 6 nucleotides at the 5′ and/or 3′ end of the sense strand core stretch sequence and/or anti sense strand core stretch sequence. The extension nucleotides on a sense strand may or may not be complementary to nucleotides, either core stretch sequence nucleotides or extension nucleotides, in the corresponding antisense strand. Conversely, the extension nucleotides on an antisense strand may or may not be complementary to nucleotides, either core stretch nucleotides or extension nucleotides, in the corresponding sense strand. In some embodiments, both the sense strand and the antisense strand of an RNAi agent contain 3′ and 5′ extensions. In some embodiments, one or more of the 3′ extension nucleotides of one strand base pairs with one or more 5′ extension nucleotides of the other strand. In other embodiments, one or more of 3′ extension nucleotides of one strand do not base pair with one or more 5′ extension nucleotides of the other strand. In some embodiments, an HTT RNAi agent has an antisense strand having a 3′ extension and a sense strand having a 5′ extension. In some embodiments, the extension nucleotide(s) are unpaired and form an overhang. As used herein, an “overhang” refers to a stretch of one or more unpaired nucleotides located at a terminal end of either the sense strand or the antisense strand that does not form part of the hybridized or duplexed portion of an RNAi agent disclosed herein.

[0054] In some embodiments, an HTT RNAi agent comprises an antisense strand having a 3′ extension of 1, 2, 3, 4, 5, or 6 nucleotides in length. In other embodiments, an HTT RNAi agent comprises an antisense strand having a 3′ extension of 1, 2, or 3 nucleotides in length. In some embodiments, one or more of the antisense strand extension nucleotides comprise nucleotides that are complementary to the corresponding HTT mRNA sequence. In some embodiments, one or more of the antisense strand extension nucleotides comprise nucleotides that are not complementary to the corresponding HTT mRNA sequence.

[0055] In some embodiments, an HTT RNAi agent comprises a sense strand having a 3′ extension of 1, 2, 3, 4, or 5 nucleotides in length. In some embodiments, one or more of the sense strand extension nucleotides comprises adenosine, uracil, or thymidine nucleotides, AT dinucleotide, or nucleotides that correspond to or are the identical to nucleotides in the HTT mRNA sequence. In some embodiments, the 3′ sense strand extension includes or consists of one of the following sequences, but is not limited to: T, UT, TT, UU, UUT, TTT, or TTTT (each listed 5′ to 3′).

[0056] A sense strand can have a 3′ extension and/or a 5′ extension. In some embodiments, an HTT RNAi agent comprises a sense strand having a 5′ extension of 1, 2, 3, 4, 5, or 6 nucleotides in length. In some embodiments, one or more of the sense strand extension nucleotides comprise nucleotides that correspond to or are identical to nucleotides in the HTT mRNA sequence.

[0057] Examples of sequences used in forming HTT RNAi agents are provided in Tables 2, 3, 4, 5, 6, and 9. In some embodiments, an HTT RNAi agent antisense strand includes a sequence of any of the sequences in Tables 2, 3, or 9. In certain embodiments, an HTT RNAi agent antisense strand comprises or consists of any one of the modified sequences in Table 3. In some embodiments, an HTT RNAi agent antisense strand includes the sequence of nucleotides (from 5′ end→3′ end) 1-17, 2-15, 2-17, 1-18, 2-18, 1-19, 2-19, 1-20, 2-20, 1-21, or 2-21, of any of the sequences in Tables 2 or 3. In some embodiments, an HTT RNAi agent sense strand includes the sequence of any of the sequences in Tables 2, 4, 5, or 6. In some embodiments, an HTT RNAi agent sense strand includes the sequence of nucleotides (from 5′ end→3′ end) 1-18, 1-19, 1-20, 1-21, 2-19, 2-20, 2-21, 3-20, 3-21, or 4-21 of any of the sequences in Tables 2, 4, 5, or 6. In certain embodiments, an HTT RNAi agent sense strand comprises or consists of a modified sequence of any one of the modified sequences in Table 4, 5, 6, or 9.

[0058] In some embodiments, the sense and antisense strands of the RNAi agents described herein contain the same number of nucleotides. In some embodiments, the sense and antisense strands of the RNAi agents described herein contain different numbers of nucleotides. In some embodiments, the sense strand 5′ end and the antisense strand 3′ end of an RNAi agent form a blunt end. In some embodiments, the sense strand 3′ end and the antisense strand 5′ end of an RNAi agent form a blunt end. In some embodiments, both ends of an RNAi agent form blunt ends. In some embodiments, neither end of an RNAi agent is blunt-ended. As used herein a “blunt end” refers to an end of a double stranded RNAi agent in which the terminal nucleotides of the two annealed strands are complementary (form a complementary base-pair).

[0059] In some embodiments, the sense strand 5′ end and the antisense strand 3′ end of an RNAi agent form a frayed end. In some embodiments, the sense strand 3′ end and the antisense strand 5′ end of an RNAi agent form a frayed end. In some embodiments, both ends of an RNAi agent form a frayed end. In some embodiments, neither end of an RNAi agent is a frayed end. As used herein a frayed end refers to an end of a double stranded RNAi agent in which the terminal nucleotides of the two annealed strands form a pair (i.e., do not form an overhang) but are not complementary (i.e. form a non-complementary pair). In some embodiments, one or more unpaired nucleotides at the end of one strand of a double stranded RNAi agent form an overhang. The unpaired nucleotides may be on the sense strand or the antisense strand, creating either 3′ or 5′ overhangs. In some embodiments, the RNAi agent contains: a blunt end and a frayed end, a blunt end and 5′ overhang end, a blunt end and a 3′ overhang end, a frayed end and a 5′ overhang end, a frayed end and a 3′ overhang end, two 5′ overhang ends, two 3′ overhang ends, a 5′ overhang end and a 3′ overhang end, two frayed ends, or two blunt ends. Typically, when present, overhangs are located at the 3′ terminal ends of the sense strand, the antisense strand, or both the sense strand and the antisense strand.

[0060] The HTT RNAi agents disclosed herein may also be comprised of one or more modified nucleotides. In some embodiments, substantially all of the nucleotides of the sense strand and substantially all of the nucleotides of the antisense strand of the HTT RNAi agent are modified nucleotides. The HTT RNAi agents disclosed herein may further be comprised of one or more modified internucleoside linkages, e.g., one or more phosphorothioate and/or phosphorodithioate linkages. In some embodiments, an HTT RNAi agent contains one or more modified nucleotides and one or more modified internucleoside linkages. In some embodiments, a 2′-modified nucleotide is combined with modified internucleoside linkage.

[0061] In some embodiments, an HTT RNAi agent is prepared or provided as a salt, mixed salt, or a free-acid. In some embodiments, an HTT RNAi agent is prepared as a pharmaceutically acceptable salt. In some embodiments, an HTT RNAi agent is prepared as a pharmaceutically acceptable sodium salt. Such forms that are well known in the art are within the scope of the inventions disclosed herein.

### Modified Nucleotides

[0062] Modified nucleotides, when used in various oligonucleotide constructs, can preserve activity of the compound in cells while at the same time increasing the serum stability of these compounds, and can also minimize the possibility of activating interferon activity in humans upon administration of the oligonucleotide construct.

[0063] In some embodiments, an HTT RNAi agent contains one or more modified nucleotides. As used herein, a “modified nucleotide” is a nucleotide other than a ribonucleotide (2′-hydroxyl nucleotide). In some embodiments, at least 50% (e.g., at least 60%, at least 70%, at least 80%, at least 90%, at least 95%, at least 97%, at least 98%, at least 99%, or 100%) of the nucleotides are modified nucleotides. As used herein, modified nucleotides can include, but are not limited to, deoxyribonucleotides, nucleotide mimics, abasic nucleotides, 2′-modified nucleotides, inverted nucleotides, modified nucleobase-comprising nucleotides, bridged nucleotides, peptide nucleic acids (PNAs), 2′,3′-seco nucleotide mimics (unlocked nucleobase analogues), locked nucleotides, 3′-O-methoxy (2′ internucleoside linked) nucleotides, 2′-F-Arabino nucleotides, 5′-Me, 2′-fluoro nucleotide, morpholino nucleotides, vinyl phosphonate deoxyribonucleotides, vinyl phosphonate containing nucleotides, and cyclopropyl phosphonate containing nucleotides. 2′-modified nucleotides (i.e., a nucleotide with a group other than a hydroxyl group at the 2′ position of the five-membered sugar ring) include, but are not limited to, 2′-O-methyl nucleotides (also referred to herein or in the art as 2′-methoxy nucleotides), 2′-fluoro nucleotides (also referred to herein or in the art as 2′-deoxy-2′-fluoro nucleotides), 2′-deoxy nucleotides, 2′-methoxyethyl (2′-O-2-methoxylethyl) nucleotides (also referred herein or in the art as 2′-MOE nucleotides), 2′-amino nucleotides, and 2′-alkyl nucleotides. It is not necessary for all positions in a given compound to be uniformly modified. Conversely, more than one modification can be incorporated in a single HTT RNAi agent or even in a single nucleotide thereof. The HTT RNAi agent sense strands and antisense strands can be synthesized and/or modified by methods known in the art. Modification at one nucleotide is independent of modification at another nucleotide.

[0064] Modified nucleobases include synthetic and natural nucleobases, such as 5-substituted pyrimidines, 6-azapyrimidines and N-2, N-6 and 0-6 substituted purines, (e.g., 2-aminopropyladenine, 5-propynyluracil, or 5-propynylcytosine), 5-methylcytosine (5-me-C), 5-hydroxymethyl cytosine, inosine, xanthine, hypoxanthine, 2-aminoadenine, 6-alkyl (e.g., 6-methyl, 6-ethyl, 6-isopropyl, or 6-n-butyl) derivatives of adenine and guanine, 2-alkyl (e.g., 2-methyl, 2-ethyl, 2-isopropyl, or 2-n-butyl) and other alkyl derivatives of adenine and guanine, 2-thiouracil, 2-thiothymine, 2-thiocytosine, 5-halouracil, cytosine, 5-propynyl uracil, 5-propynyl cytosine, 6-azo uracil, 6-azo cytosine, 6-azo thymine, 5-uracil (pseudouracil), 4-thiouracil, 8-halo, 8-amino, 8-sulfhydryl, 8-thioalkyl, 8-hydroxyl and other 8-substituted adenines and guanines, 5-halo (e.g., 5-bromo), 5-trifluoromethyl, and other 5-substituted uracils and cytosines, 7-methylguanine and 7-methyladenine, 8-azaguanine and 8-azaadenine, 7-deazaguanine, 7-deazaadenine, 3-deazaguanine, and 3-deazaadenine.

[0065] In some embodiments, the 5′ and/or 3′ end of the antisense strand can include abasic residues (Ab), which can also be referred to as an “abasic site” or “abasic nucleotide.” An abasic residue (Ab) is a nucleotide or nucleoside that lacks a nucleobase at the 1′ position of the sugar moiety. (See, e.g., U.S. Pat. No. 5,998,203). In some embodiments, an abasic residue can be placed internally in a nucleotide sequence. In some embodiments, Ab or AbAb can be added to the 3′ end of the antisense strand. In some embodiments, the 5′ end of the sense strand can include one or more additional abasic residues (e.g., (Ab) or (AbAb)). In some embodiments, UUAb, UAb, or Ab are added to the 3′ end of the sense strand. In some embodiments, an abasic (deoxyribose) residue can be replaced with a ribitol (abasic ribose) residue.

[0066] In some embodiments, all or substantially all of the nucleotides of an RNAi agent are modified nucleotides. As used herein, an RNAi agent wherein substantially all of the nucleotides present are modified nucleotides is an RNAi agent having four or fewer (i.e., 0, 1, 2, 3, or 4) nucleotides in both the sense strand and the antisense strand being ribonucleotides (i.e., unmodified). As used herein, a sense strand wherein substantially all of the nucleotides present are modified nucleotides is a sense strand having two or fewer (i.e., 0, 1, or 2) nucleotides in the sense strand being unmodified ribonucleotides. As used herein, an antisense strand wherein substantially all of the nucleotides present are modified nucleotides is an antisense strand having two or fewer (i.e., 0, 1, or 2) nucleotides in the antisense strand being unmodified ribonucleotides. In some embodiments, one or more nucleotides of an RNAi agent is an unmodified ribonucleotide. Chemical structures for certain modified nucleotides are set forth in Table 10 herein.

### Modified Internucleoside Linkages

[0067] In some embodiments, one or more nucleotides of an HTT RNAi agent are linked by non-standard linkages or backbones (i.e., modified internucleoside linkages or modified backbones). Modified internucleoside linkages or backbones include, but are not limited to, phosphorothioate and/or phosphorodithioate groups (represented herein as a lower case “s” for phosphorothioate and “ss” for phosphorodithioate), chiral phosphorothioates, thiophosphates, phosphorodithioates, phosphotriesters, aminoalkyl-phosphotriesters, alkyl phosphonates (e.g., methyl phosphonates or 3′-alkylene phosphonates), chiral phosphonates, phosphinates, phosphoramidates (e.g., 3′-amino phosphoramidate, aminoalkylphosphoramidates, or thionophosphoramidates), thionoalkyl-phosphonates, thionoalkylphosphotriesters, morpholino linkages, boranophosphates having normal 3′-5′ linkages, 2′-5′ linked analogs of boranophosphates, or boranophosphates having inverted polarity wherein the adjacent pairs of nucleoside units are linked 3′-5′ to 5′-3′ or 2′-5′ to 5′-2′. In some embodiments, a modified internucleoside linkage or backbone lacks a phosphorus atom. Modified internucleoside linkages lacking a phosphorus atom include, but are not limited to, short chain alkyl or cycloalkyl inter-sugar linkages, mixed heteroatom and alkyl or cycloalkyl inter-sugar linkages, or one or more short chain heteroatomic or heterocyclic inter-sugar linkages. In some embodiments, modified internucleoside backbones include, but are not limited to, siloxane backbones, sulfide backbones, sulfoxide backbones, sulfone backbones, formacetyl and thioformacetyl backbones, methylene formacetyl and thioformacetyl backbones, alkene-containing backbones, sulfamate backbones, methyleneimino and methylenehydrazino backbones, sulfonate and sulfonamide backbones, amide backbones, and other backbones having mixed N, O, S. and CH₂ components.

[0068] In some embodiments, a sense strand of an HTT RNAi agent can contain 1, 2, 3, 4, 5, or 6 phosphorothioate and/or phosphorodithioate linkages, an antisense strand of an HTT RNAi agent can contain 1, 2, 3, 4, 5, or 6 phosphorothioate and/or phosphorodithioate linkages, or both the sense strand and the antisense strand independently can contain 1, 2, 3, 4, 5, or 6 phosphorothioate and/or phosphorodithioate linkages. In some embodiments, a sense strand of an HTT RNAi agent can contain 1, 2, 3, or 4 phosphorothioate or phosphorodithioate linkages, an antisense strand of an HTT RNAi agent can contain 1, 2, 3, or 4 phosphorothioate or phosphorodithioate linkages, or both the sense strand and the antisense strand independently can contain 1, 2, 3, or 4 phosphorothioate or phosphorodithioate linkages.

[0069] In some embodiments, an HTT RNAi agent sense strand contains at least two phosphorothioate or phosphorodithioate internucleoside linkages. In some embodiments, the phosphorothioate or phosphorodithioate internucleoside linkages are between the nucleotides at positions 1-3 from the 3′ end of the sense strand. In some embodiments, one phosphorothioate or phosphorodithioate internucleoside linkage is at the 5′ end of the sense strand nucleotide sequence, and another phosphorothioate or phosphorodithioate linkage is at the 3′ end of the sense strand nucleotide sequence. In some embodiments, two phosphorothioate or phosphorodithioate internucleoside linkage are located at the 5′ end of the sense strand, and another phosphorothioate or phosphorodithioate linkage is at the 3′ end of the sense strand. In some embodiments, the sense strand does not include any phosphorothioate or phosphorodithioate internucleoside linkages between the nucleotides, but contains one, two, or three phosphorothioate or phosphorodithioate linkages between the terminal nucleotides on both the 5′ and 3′ ends and the optionally present inverted abasic residue terminal caps. In some embodiments, a targeting ligand is linked to the sense strand via a phosphorothioate or phosphorodithioate linkage.

[0070] In some embodiments, an HTT RNAi agent antisense strand contains four phosphorothioate or phosphorodithioate internucleoside linkages. In some embodiments, the four phosphorothioate or phosphorodithioate internucleoside linkages are between the nucleotides at positions 1-3 from the 5′ end of the antisense strand and between the nucleotides at positions 19-21, 20-22, 21-23, 22-24, 23-25, or 24-26 from the 5′ end. In some embodiments, three phosphorothioate or phosphorodithioate internucleoside linkages are located between positions 1-4 from the 5′ end of the antisense strand, and a fourth phosphorothioate or phosphorodithioate internucleoside linkage is located between positions 20-21 from the 5′ end of the antisense strand. In some embodiments, an HTT RNAi agent contains at least three or four phosphorothioate or phosphorodithioate internucleoside linkages in the antisense strand.

### Capping Residues or Moieties

[0071] In some embodiments, the sense strand may include one or more capping residues or moieties, sometimes referred to in the art as a “cap,” a “terminal cap,” or a “capping residue.” As used herein, a “capping residue” is a non-nucleotide compound or other moiety that can be incorporated at one or more termini of a nucleotide sequence of an RNAi agent disclosed herein. A capping residue can provide the RNAi agent, in some instances, with certain beneficial properties, such as, for example, protection against exonuclease degradation. In some embodiments, inverted abasic residues (invAb) (also referred to in the art as “inverted abasic sites”) are added as capping residues (see Table 10). (See, e.g., F. Czauderna, Nucleic Acids Res., 2003, 31(11), 2705-16). Capping residues are generally known in the art, and include, for example, inverted abasic residues as well as carbon chains such as a terminal C₃H₇ (propyl), C₆H₁₃ (hexyl), or C₁₂H₂₅ (dodecyl) groups. In some embodiments, a capping residue is present at either the 5′ terminal end, the 3′ terminal end, or both the 5′ and 3′ terminal ends of the sense strand. In some embodiments, the 5′ end and/or the 3′ end of the sense strand may include more than one inverted abasic deoxyribose moiety as a capping residue.

[0072] In some embodiments, one or more inverted abasic residues (invAb) are added to the 3′ end of the sense strand. In some embodiments, one or more inverted abasic residues (invAb) are added to the 5′ end of the sense strand. In some embodiments, one or more inverted abasic residues or inverted abasic sites are inserted between a targeting ligand and the nucleotide sequence of the sense strand of the RNAi agent. In some embodiments, the inclusion of one or more inverted abasic residues or inverted abasic sites at or near the terminal end or terminal ends of the sense strand of an RNAi agent allows for enhanced activity or other desired properties of an RNAi agent.

[0073] In some embodiments, one or more inverted abasic residues (invAb) are added to the 5′ end of the sense strand. In some embodiments, one or more inverted abasic residues can be inserted between a targeting ligand and the nucleotide sequence of the sense strand of the RNAi agent. The inverted abasic residues may be linked via phosphate, phosphorothioate or phosphorodithioate (e.g., shown herein as (invAb)s)), or other internucleoside linkages. In some embodiments, the inclusion of one or more inverted abasic residues at or near the terminal end or terminal ends of the sense strand of an RNAi agent may allow for enhanced activity or other desired properties of an RNAi agent. In some embodiments, an inverted abasic (deoxyribose) residue can be replaced with an inverted ribitol (abasic ribose) residue. In some embodiments, the 3′ end of the antisense strand core stretch sequence, or the 3′ end of the antisense strand sequence, may include an inverted abasic residue. The chemical structures for inverted abasic deoxyribose residues are shown in Table 10 below.

### HTT RNAi Agents

[0074] The HTT RNAi agents disclosed herein are designed to target specific positions on an HTT gene (e.g., SEQ ID NO:1 (NM_002111.8)). As defined herein, an antisense strand sequence is designed to target an HTT gene at a given position on the gene when the 5′ terminal nucleobase of the antisense strand is aligned with a position that is 21 nucleotides downstream (towards the 3′ end) from the position on the gene when base pairing to the gene. For example, as illustrated in Tables 1 and 2 herein, an antisense strand sequence designed to target an HTT gene at position 304 requires that when base pairing to the gene, the 5′ terminal nucleobase of the antisense strand is aligned with position 324 of an HTT gene.

[0075] As provided herein, an HTT RNAi agent does not require that the nucleobase at position 1 (5′→3′) of the antisense strand be complementary to the gene, provided that there is at least 85% complementarity (e.g., at least 85, 86, 87, 88, 89, 90, 91, 92, 93, 94, 95, 96, 97, 98, 99, or 100% complementarity) of the antisense strand and the gene across a core stretch sequence of at least 16 consecutive nucleotides. For example, for an HTT RNAi agent disclosed herein that is designed to target position 304 of an HTT gene, the 5′ terminal nucleobase of the antisense strand of the HTT RNAi agent must be aligned with position 324 of the gene; however, the 5′ terminal nucleobase of the antisense strand may be, but is not required to be, complementary to position 324 of an HTT gene, provided that there is at least 85% complementarity (e.g., at least 85, 86, 87, 88, 89, 90, 91, 92, 93, 94, 95, 96, 97, 98, 99, or 100% complementarity) of the antisense strand and the gene transcript across a core stretch sequence of at least 16 consecutive nucleotides. As shown by, among other things, the various examples disclosed herein, the specific site of binding of the gene by the antisense strand of the HTT RNAi agent (e.g., whether the HTT RNAi agent is designed to target an HTT gene at position 304, at position 264, at position 785, or at some other position) is an important factor to the level of inhibition achieved by the HTT RNAi agent. (See, e.g., Kamola et al., The siRNA Non-seed Region and Its Target Sequences are Auxiliary Determinants of Off-Target Effects, PLOS Computational Biology, 11(12), FIG. 1 (2015)).

[0076] In some embodiments, the HTT RNAi agents disclosed herein target an HTT gene at or near the positions of the HTT sequence shown in Table 1. In some embodiments, the antisense strand of an HTT RNAi agent disclosed herein includes a core stretch sequence that is fully, substantially, or at least partially complementary to a target HTT 19-mer sequence disclosed in Table 1.

TABLE 1
HTT 19-mer mRNA Target Sequences (taken from homo sapiens huntingtin
(HTT) transcript, mRNA, 13498 bases, GenBank NM_002111.8 (SEQ ID NO:1))

| | HTT 19-mer | Corresponding Positions | Targeted Gene |
|---|---|---|---|
| SEQ ID | Target Sequences | of Sequence | Position (as |
| No. | (5′ → 3′) | on SEQ ID NO: 1 | referred to herein) |
| 46 | CUCAGGUUCUGCUUUUACC | 32-50 | 30 |
| 47 | GACCCUGGAAAAGCUGAUG | 151-169 | 149 |
| 48 | ACCCUGGAAAAGCUGAUGA | 152-170 | 150 |
| 49 | CCCUGGAAAAGCUGAUGAA | 153-171 | 151 |
| 50 | GAAAAGCUGAUGAAGGCCU | 158-176 | 156 |
| 51 | UGAUGAAGGCCUUCGAGUC | 165-183 | 163 |
| 52 | GAUGAAGGCCUUCGAGUCC | 166-184 | 164 |
| 53 | CCUUCGAGUCCCUCAAGUC | 174-192 | 172 |
| 54 | CUUCGAGUCCCUCAAGUCC | 175-193 | 173 |
| 55 | CUGCACCGACCAAAGAAAG | 404-422 | 402 |
| 56 | UGCACCGACCAAAGAAAGA | 405-423 | 403 |
| 57 | GCACCGACCAAAGAAAGAA | 406-424 | 404 |
| 58 | UCGCUAUGGAACUUUUUCU | 531-549 | 529 |
| 59 | UUUGAUGGAUUCUAAUCUU | 622-640 | 620 |
| 60 | UGGAUUCUAAUCUUCCAAG | 627-645 | 625 |
| 61 | GCAAUUUUGCAAAUGACAA | 870-888 | 868 |
| 62 | GACGUUACAUCAUACACAG | 1231-1249 | 1229 |
| 63 | ACCAAGACCACAAUGUUGU | 1251-1269 | 1249 |
| 64 | GUAUUGUGGAACUUAUAGC | 1407-1425 | 1405 |
| 65 | UGAACUACAUCGAUCAUGG | 2412-2430 | 2410 |
| 66 | GAUGCUGUGAAGCUUUGUG | 3222-3240 | 3220 |
| 67 | GGUCCUGUUACAACAAGUA | 3800-3818 | 3798 |
| 68 | ACAAGUAAAUCCUCAUCAC | 3812-3830 | 3810 |
| 69 | AAUGAUGGCAACUGUUUGU | 4066-4084 | 4064 |
| 70 | GGUGUUUAUUGGCUUUGUA | 4558-4576 | 4556 |
| 71 | ACAGAUCAUUGGAAUUCCU | 4687-4705 | 4685 |
| 72 | GCGACUGUCUCGACAGAUA | 4963-4981 | 4961 |
| 73 | CGUGAGCACUGUUCAACUG | 5146-5164 | 5144 |
| 74 | AGCACAAAGUUACUUAGUC | 5744-5762 | 5742 |
| 75 | AGCCAAACUUGGAAUGUGC | 5800-5818 | 5798 |
| 76 | GCAAUAGAGAAAUAGUACG | 5817-5835 | 5815 |
| 77 | UGAUUAUGUCUGUCAGAAC | 5860-5878 | 5858 |
| 78 | GUCAGAACCUCCAUGACUC | 5871-5889 | 5869 |
| 79 | UCAUUGUAAAUCACAUUCA | 5907-5925 | 5905 |
| 80 | GUACAGGACUUCAUCAGUG | 5957-5975 | 5955 |
| 81 | GCAAUUCAGUCUCGUUGUG | 6017-6035 | 6015 |
| 82 | UGCCAAUGGAAGAACUCAA | 6243-6261 | 6241 |
| 83 | AUGCAAGACUCACUUAGUC | 6350-6368 | 6348 |
| 84 | GGAUGAGUGAAAUUUCUGG | 6606-6624 | 6604 |
| 85 | GGAGCAAGUUGAAUGAUCU | 6756-6774 | 6754 |

[0077] Homo sapiens huntingtin (HTT), transcript variant 2, mRNA, GenBank NM_002111.8 (SEQ ID NO:1), gene transcript (13498 bases):

```
        1 gctgccggga cgggtccaag atggacggcc gctcaggttc tgcttttacc tgcggcccag
      61 agccccattc attgccccgg tgctgagcgg cgccgcgagt cggcccgagg cctccgggga
    121 ctgccgtgcc gggcgggaga ccgccatggc gaccctggaa aagctgatga aggccttcga
    181 gtccctcaag tccttccagc agcagcagca gcagcagcag cagcagcagc agcagcagca
    241 gcagcagcag cagcagcagc aacagccgcc accgccgccg ccgccgccgc cgcctcctca
    301 gcttcctcag ccgccgccgc aggcacagcc gctgctgcct cagccgcagc cgcccccgcc
    361 gccgcccccg ccgccacccg gcccggctgt ggctgaggag ccgctgcacc gaccaaagaa
    421 agaactttca gctaccaaga aagaccgtgt gaatcattgt ctgacaatat gtgaaaacat
    481 agtggcacag tctgtcagaa attctccaga atttcagaaa cttctgggca tcgctatgga
    541 actttttctg ctgtgcagtg atgacgcaga gtcagatgtc aggatggtgg ctgacgaatg
    601 cctcaacaaa gttatcaaag ctttgatgga ttctaatctt ccaaggttac agctcgagct
    661 ctataaggaa attaaaaaga atggtgcccc tcggagtttg cgtgctgccc tgtggaggtt
    721 tgctgagctg gctcacctgg ttcggcctca gaaatgcagg ccttacctgg tgaaccttct
    781 gccgtgcctg actcgaacaa gcaagagacc cgaagaatca gtccaggaga ccttggctgc
    841 agctgttccc aaaattatgg cttcttttgg caattttgca aatgacaatg aaattaaggt
    901 tttgttaaag gccttcatag cgaacctgaa gtcaagctcc cccaccattc ggcggacagc
    961 ggctggatca gcagtgagca tctgccagca ctcaagaagg acacaatatt tctatagttg
  1021 gctactaaat gtgctcttag gcttactcgt tcctgtcgag gatgaacact ccactctgct
  1081 gattcttggc gtgctgctca ccctgaggta tttggtgccc ttgctgcagc agcaggtcaa
  1141 ggacacaagc ctgaaaggca gcttcggagt gacaaggaaa gaaatggaag tctctccttc
  1201 tgcagagcag cttgtccagg tttatgaact gacgttacat catacacagc accaagacca
  1261 caatgttgtg accggagccc tggagctgtt gcagcagctc ttcagaacgc ctccacccga
  1321 gcttctgcaa accctgaccg cagtcggggg cattgggcag ctcaccgctg ctaaggagga
  1381 gtctggtggc cgaagccgta gtgggagtat tgtggaactt atagctggag ggggttcctc
  1441 atgcagccct gtcctttcaa gaaaacaaaa aggcaaagtg ctcttaggag aagaagaagc
  1501 cttggaggat gactctgaat cgagatcgga tgtcagcagc tctgccttaa cagcctcagt
  1561 gaaggatgag atcagtggag agctggctgc ttcttcaggg gtttccactc cagggtcagc
  1621 aggtcatgac atcatcacag aacagccacg gtcacagcac acactgcagg cggactcagt
  1681 ggatctggcc agctgtgact tgacaagctc tgccactgat ggggatgagg aggatatctt
  1741 gagccacagc tccagccagg tcagcgccgt cccatctgac cctgccatgg acctgaatga
  1801 tgggacccag gcctcgtcgc ccatcagcga cagctcccag accaccaccg aagggcctga
  1861 ttcagctgtt accccttcag acagttctga aattgtgtta gacggtaccg acaaccagta
  1921 tttgggcctg cagattggac agccccagga tgaagatgag gaagccacag gtattcttcc
  1981 tgatgaagcc tcggaggcct tcaggaactc ttccatggcc cttcaacagg cacatttatt
  2041 gaaaaacatg agtcactgca ggcagccttc tgacagcagt gttgataaat ttgtgttgag
  2101 agatgaagct actgaaccgg gtgatcaaga aaacaagcct tgccgcatca aaggtgacat
  2161 tggacagtcc actgatgatg actctgcacc tcttgtccat tgtgtccgcc ttttatctgc
  2221 ttcgtttttg ctaacagggg gaaaaaatgt gctggttccg gacagggatg tgagggtcag
  2281 cgtgaaggcc ctggccctca gctgtgtggg agcagctgtg gccctccacc cggaatcttt
  2341 cttcagcaaa ctctataaag ttcctcttga caccacggaa taccctgagg aacagtatgt
  2401 ctcagacatc ttgaactaca tcgatcatgg agacccacag gttcgaggag ccactgccat
  2461 tctctgtggg accctcatct gctccatcct cagcaggtcc cgcttccacg tgggagattg
  2521 gatgggcacc attagaaccc tcacaggaaa tacattttct ttggcggatt gcattccttt
  2581 gctgcggaaa acactgaagg atgagtcttc tgttacttgc aagttagctt gtacagctgt
  2641 gaggaactgt gtcatgagtc tctgcagcag cagctacagt gagttaggac tgcagctgat
  2701 catcgatgtg ctgactctga ggaacagttc ctattggctg gtgaggacag agcttctgga
  2761 aacccttgca gagattgact tcaggctggt gagctttttg gaggcaaaag cagaaaactt
  2821 acacagaggg gctcatcatt atacagggct tttaaaactg caagaacgag tgctcaataa
  2881 tgttgtcatc catttgcttg gagatgaaga ccccagggtg cgacatgttg ccgcagcatc
  2941 actaattagg cttgtcccaa agctgtttta taaatgtgac caaggacaag ctgatccagt
  3001 agtggccgtg gcaagagatc aaagcagtgt ttacctgaaa cttctcatgc atgagacgca
  3061 gcctccatct catttctccg tcagcacaat aaccagaata tatagaggct ataacctact
  3121 accaagcata acagacgtca ctatggaaaa taacctttca agagttattg cagcagtttc
  3181 tcatgaacta atcacatcaa ccaccagagc actcacattt ggatgctgtg aagctttgtg
  3241 tcttctttcc actgccttcc cagtttgcat ttggagttta ggttggcact gtggagtgcc
  3301 tccactgagt gcctcagatg agtctaggaa gagctgtacc gttgggatgg ccacaatgat
  3361 tctgaccctg ctctcgtcag cttggttccc attggatctc tcagcccatc aagatgcttt
  3421 gattttggcc ggaaacttgc ttgcagccag tgctcccaaa tctctgagaa gttcatgggc
  3481 ctctgaagaa gaagccaacc cagcagccac caagcaagag gaggtctggc cagccctggg
  3541 ggaccgggcc ctggtgccca tggtggagca gctcttctct cacctgctga aggtgattaa
  3601 catttgtgcc cacgtcctgg atgacgtggc tcctggaccc gcaataaagg cagccttgcc
  3661 ttctctaaca aacccccctt ctctaagtcc catccgacga aaggggaagg agaaagaacc
  3721 aggagaacaa gcatctgtac cgttgagtcc caagaaaggc agtgaggcca gtgcagcttc
  3781 tagacaatct gatacctcag gtcctgttac aacaagtaaa tcctcatcac tggggagttt
  3841 ctatcatctt ccttcatacc tcaaactgca tgatgtcctg aaagctacac acgctaacta
  3901 caaggtcacg ctggatcttc agaacagcac ggaaaagttt ggagggtttc tccgctcagc
  3961 cttggatgtt ctttctcaga tactagagct ggccacactg caggacattg ggaagtgtgt
  4021 tgaagagatc ctaggatacc tgaaatcctg ctttagtcga gaaccaatga tggcaactgt
  4081 ttgtgttcaa caattgttga agactctctt tggcacaaac ttggcctccc agtttgatgg
  4141 cttatcttcc aaccccagca agtcacaagg ccgagcacag cgccttggct cctccagtgt
  4201 gaggccaggc ttgtaccact actgcttcat ggccccgtac acccacttca cccaggccct
  4261 cgctgacgcc agcctgagga acatggtgca ggcggagcag gagaacgaca cctcgggatg
  4321 gtttgatgtc ctccagaaag tgtctaccca gttgaagaca aacctcacga gtgtcacaaa
  4381 gaaccgtgca gataagaatg ctattcataa tcacattcgt ttgtttgaac ctcttgttat
  4441 aaaagcttta aaacagtaca cgactacaac atgtgtgcag ttacagaagc aggttttaga
  4501 tttgctggcg cagctggttc agttacgggt taattactgt cttctggatt cagatcaggt
  4561 gtttattggc tttgtattga aacagtttga atacattgaa gtgggccagt tcagggaatc
  4621 agaggcaatc attccaaaca tctttttctt cttggtatta ctatcttatg aacgctatca
  4681 ttcaaaacag atcattggaa ttcctaaaat cattcagctc tgtgatggca tcatggccag
  4741 tggaaggaag gctgtgacac atgccatacc ggctctgcag cccatagtcc acgacctctt
  4801 tgtattaaga ggaacaaata aagctgatgc aggaaaagag cttgaaaccc aaaaagaggt
  4861 ggtggtgtca atgttactga gactcatcca gtaccatcag gtgttggaga tgttcattct
  4921 tgtcctgcag cagtgccaca aggagaatga agacaagtgg aagcgactgt ctcgacagat
  4981 agctgacatc atcctcccaa tgttagccaa acagcagatg cacattgact ctcatgaagc
  5041 ccttggagtg ttaaatacat tatttgagat tttggcccct tcctccctcc gtccggtaga
  5101 catgctttta cggagtatgt tcgtcactcc aaacacaatg gcgtccgtga gcactgttca
  5161 actgtggata tcgggaattc tggccatttt gagggttctg atttcccagt caactgaaga
  5221 tattgttctt tctcgtattc aggagctctc cttctctccg tatttaatct cctgtacagt
  5281 aattaatagg ttaagagatg gggacagtac ttcaacgcta gaagaacaca gtgaagggaa
  5341 acaaataaag aatttgccag aagaaacatt ttcaaggttt ctattacaac tggttggtat
  5401 tcttttagaa gacattgtta caaaacagct gaaggtggaa atgagtgagc agcaacatac
  5461 tttctattgc caggaactag gcacactgct aatgtgtctg atccacatct tcaagtctgg
  5521 aatgttccgg agaatcacag cagctgccac taggctgttc cgcagtgatg gctgtggcgg
  5581 cagtttctac accctggaca gcttgaactt gcgggctcgt tccatgatca ccacccaccc
  5641 ggccctggtg ctgctctggt gtcagatact gctgcttgtc aaccacaccg actaccgctg
  5701 gtgggcagaa gtgcagcaga ccccgaaaag acacagtctg tccagcacaa agttacttag
  5761 tccccagatg tctggagaag aggaggattc tgacttggca gccaaacttg gaatgtgcaa
  5821 tagagaaata gtacgaagag gggctctcat tctcttctgt gattatgtct gtcagaacct
  5881 ccatgactcc gagcacttaa cgtggctcat tgtaaatcac attcaagatc tgatcagcct
  5941 ttcccacgag cctccagtac aggacttcat cagtgccgtt catcggaact ctgctgccag
  6001 cggcctgttc atccaggcaa ttcagtctcg ttgtgaaaac ctttcaactc caaccatgct
  6061 gaagaaaact cttcagtgct tggaggggat ccatctcagc cagtcgggag ctgtgctcac
  6121 gctgtatgtg gacaggcttc tgtgcacccc tttccgtgtg ctggctcgca tggtcgacat
  6181 ccttgcttgt cgccgggtag aaatgcttct ggctgcaaat ttacagagca gcatggccca
  6241 gttgccaatg gaagaactca acagaatcca ggaatacctt cagagcagcg ggctcgctca
  6301 gagacaccaa aggctctatt ccctgctgga caggtttcgt ctctccacca tgcaagactc
  6361 acttagtccc tctcctccag tctcttccca cccgctggac ggggatgggc acgtgtcact
  6421 ggaaacagtg agtccggaca aagactggta cgttcatctt gtcaaatccc agtgttggac
  6481 caggtcagat tctgcactgc tggaaggtgc agagctggtg aatcggattc ctgctgaaga
  6541 tatgaatgcc ttcatgatga actcggagtt caacctaagc ctgctagctc catgcttaag
  6601 cctagggatg agtgaaattt ctggtggcca gaagagtgcc ctttttgaag cagcccgtga
  6661 ggtgactctg gcccgtgtga gcggcaccgt gcagcagctc cctgctgtcc atcatgtctt
  6721 ccagcccgag ctgcctgcag agccggcggc ctactggagc aagttgaatg atctgtttgg
  6781 ggatgctgca ctgtatcagt ccctgcccac tctggcccgg gccctggcac agtacctggt
  6841 ggtggtctcc aaactgccca gtcatttgca ccttcctcct gagaaagaga aggacattgt
  6901 gaaattcgtg gtggcaaccc ttgaggccct gtcctggcat ttgatccatg agcagatccc
  6961 gctgagtctg gatctccagg cagggctgga ctgctgctgc ctggccctgc agctgcctgg
  7021 cctctggagc gtggtctcct ccacagagtt tgtgacccac gcctgctccc tcatctactg
  7081 tgtgcacttc atcctggagg ccgttgcagt gcagcctgga gagcagcttc ttagtccaga
  7141 aagaaggaca aataccccaa aagccatcag cgaggaggag gaggaagtag atccaaacac
  7201 acagaatcct aagtatatca ctgcagcctg tgagatggtg gcagaaatgg tggagtctct
  7261 gcagtcggtg ttggccttgg gtcataaaag gaatagcggc gtgccggcgt ttctcacgcc
  7321 attgctaagg aacatcatca tcagcctggc ccgcctgccc cttgtcaaca gctacacacg
  7381 tgtgccccca ctggtgtgga agcttggatg gtcacccaaa ccgggagggg attttggcac
  7441 agcattccct gagatccccg tggagttcct ccaggaaaag gaagtcttta aggagttcat
  7501 ctaccgcatc aacacactag gctggaccag tcgtactcag tttgaagaaa cttgggccac
  7561 cctccttggt gtcctggtga cgcagcccct cgtgatggag caggaggaga gcccaccaga
  7621 agaagacaca gagaggaccc agatcaacgt cctggccgtg caggccatca cctcactggt
  7681 gctcagtgca atgactgtgc ctgtggccgg caacccagct gtaagctgct tggagcagca
  7741 gccccggaac aagcctctga aagctctcga caccaggttt gggaggaagc tgagcattat
  7801 cagagggatt gtggagcaag agattcaagc aatggtttca aagagagaga atattgccac
  7861 ccatcattta tatcaggcat gggatcctgt cccttctctg tctccggcta ctacaggtgc
  7921 cctcatcagc cacgagaagc tgctgctaca gatcaacccc gagcgggagc tggggagcat
  7981 gagctacaaa ctcggccagg tgtccataca ctccgtgtgg ctggggaaca gcatcacacc
  8041 cctgagggag gaggaatggg acgaggaaga ggaggaggag gccgacgccc ctgcaccttc
  8101 gtcaccaccc acgtctccag tcaactccag gaaacaccgg gctggagttg acatccactc
  8161 ctgttcgcag tttttgcttg agttgtacag ccgctggatc ctgccgtcca gctcagccag
  8221 gaggaccccg gccatcctga tcagtgaggt ggtcagatcc cttctagtgg tctcagactt
  8281 gttcaccgag cgcaaccagt ttgagctgat gtatgtgacg ctgacagaac tgcgaagggt
  8341 gcacccttca gaagacgaga tcctcgctca gtacctggtg cctgccacct gcaaggcagc
  8401 tgccgtcctt gggatggaca aggccgtggc ggagcctgtc agccgcctgc tggagagcac
  8461 gctcaggagc agccacctgc ccagcagggt tggagccctg cacggcgtcc tctatgtgct
  8521 ggagtgcgac ctgctggacg acactgccaa gcagctcatc ccggtcatca gcgactatct
  8581 cctctccaac ctgaaaggga tcgcccactg cgtgaacatt cacagccagc agcacgtact
  8641 ggtcatgtgt gccactgcgt tttacctcat tgagaactat cctctggacg tagggccgga
  8701 attttcagca tcaataatac agatgtgtgg ggtgatgctg tctggaagtg aggagtccac
  8761 cccctccatc atttaccact gtgccctcag aggcctggag cgcctcctgc tctctgagca
  8821 gctctcccgc ctggatgcag aatcgctggt caagctgagt gtggacagag tgaacgtgca
  8881 cagcccgcac cgggccatgg cggctctggg cctgatgctc acctgcatgt acacaggaaa
  8941 ggagaaagtc agtccgggta gaacttcaga ccctaatcct gcagcccccg acagcgagtc
  9001 agtgattgtt gctatggagc gggtatctgt tctttttgat aggatcagga aaggctttcc
  9061 ttgtgaagcc agagtggtgg ccaggatcct gccccagttt ctagacgact tcttcccacc
  9121 ccaggacatc atgaacaaag tcatcggaga gtttctgtcc aaccagcagc cataccccca
  9181 gttcatggcc accgtggtgt ataaggtgtt tcagactctg cacagcaccg ggcagtcgtc
  9241 catggtccgg gactgggtca tgctgtccct ctccaacttc acgcagaggg ccccggtcgc
  9301 catggccacg tggagcctct cctgcttctt tgtcagcgcg tccaccagcc cgtgggtcgc
  9361 ggcgatcctc ccacatgtca tcagcaggat gggcaagctg gagcaggtgg acgtgaacct
  9421 tttctgcctg gtcgccacag acttctacag acaccagata gaggaggagc tcgaccgcag
  9481 ggccttccag tctgtgcttg aggtggttgc agccccagga agcccatatc accggctgct
  9541 gacttgttta cgaaatgtcc acaaggtcac cacctgctga gcgccatggt gggagagact
  9601 gtgaggcggc agctggggcc ggagcctttg gaagtctgcg cccttgtgcc ctgcctccac
  9661 cgagccagct tggtccctat gggcttccgc acatgccgcg ggcggccagg caacgtgcgt
  9721 gtctctgcca tgtggcagaa gtgctctttg tggcagtggc caggcaggga gtgtctgcag
  9781 tcctggtggg gctgagcctg aggccttcca gaaagcagga gcagctgtgc tgcaccccat
  9841 gtgggtgacc aggtcctttc tcctgatagt cacctgctgg ttgttgccag gttgcagctg
  9901 ctcttgcatc tgggccagaa gtcctccctc ctgcaggctg gctgttggcc cctctgctgt
  9961 cctgcagtag aaggtgccgt gagcaggctt tgggaacact ggcctgggtc tccctggtgg
10021 ggtgtgcatg ccacgccccg tgtctggatg cacagatgcc atggcctgtg ctgggccagt
10081 ggctgggggt gctagacacc cggcaccatt ctcccttctc tcttttcttc tcaggattta
10141 aaatttaatt atatcagtaa agagattaat tttaacgtaa ctctttctat gcccgtgtaa
10201 agtatgtgaa tcgcaaggcc tgtgctgcat gcgacagcgt ccggggtggt ggacagggcc
10261 cccggccacg ctccctctcc tgtagccact ggcatagccc tcctgagcac ccgctgacat
10321 ttccgttgta catgttcctg tttatgcatt cacaaggtga ctgggatgta gagaggcgtt
10381 agtgggcagg tggccacagc aggactgagg acaggccccc attatcctag gggtgcgctc
10441 acctgcagcc cctcctcctc gggcacagac gactgtcgtt ctccacccac cagtcaggga
10501 cagcagcctc cctgtcactc agctgagaag gccagccctc cctggctgtg agcagcctcc
10561 actgtgtcca gagacatggg cctcccactc ctgttccttg ctagccctgg ggtggcgtct
10621 gcctaggagc tggctggcag gtgttgggac ctgctgctcc atggatgcat gccctaagag
10681 tgtcactgag ctgtgttttg tctgagcctc tctcggtcaa cagcaaagct tggtgtcttg
10741 gcactgttag tgacagagcc cagcatccct tctgcccccg ttccagctga catcttgcac
10801 ggtgacccct tttagtcagg agagtgcaga tctgtgctca tcggagactg ccccacggcc
10861 ctgtcagagc cgccactcct atccccaggc caggtccctg gaccagcctc ctgtttgcag
10921 gcccagagga gccaagtcat taaaatggaa gtggattctg gatggccggg ctgctgctga
10981 tgtaggagct ggatttggga gctctgcttg ccgactggct gtgagacgag gcaggggctc
11041 tgcttcctca gccctagagg cgagccaggc aaggttggcg actgtcatgt ggcttggttt
11101 ggtcatgccc gtcgatgttt tgggtattga atgtggtaag tggaggaaat gttggaactc
11161 tgtgcaggtg ctgccttgag acccccaagc ttccacctgt ccctctccta tgtggcagct
11221 ggggagcagc tgagatgtgg acttgtatgc tgcccacata cgtgaggggg agctgaaagg
11281 gagcccctcc tctgagcagc ctctgccagg cctgtatgag gcttttccca ccagctccca
11341 acagaggcct cccccagcca ggaccacctc gtcctcgtgg cggggcagca ggagcggtag
11401 aaaggggtcc gatgtttgag gaggccctta agggaagcta ctgaattata acacgtaaga
11461 aaatcaccat tccgtattgg ttgggggctc ctgtttctca tcctagcttt ttcctggaaa
11521 gcccgctaga aggtttggga acgaggggaa agttctcaga actgttggct gctccccacc
11581 cgcctcccgc ctcccccgca ggttatgtca gcagctctga gacagcagta tcacaggcca
11641 gatgttgttc ctggctagat gtttacattt gtaagaaata acactgtgaa tgtaaaacag
11701 agccattccc ttggaatgca tatcgctggg ctcaacatag agtttgtctt cctcttgttt
11761 acgacgtgat ctaaaccagt ccttagcaag gggctcagaa caccccgctc tggcagtagg
11821 tgtcccccac ccccaaagac ctgcctgtgt gctccggaga tgaatatgag ctcattagta
11881 aaaatgactt cacccacgca tatacataaa gtatccatgc atgtgcatat agacacatct
11941 ataattttac acacacacct ctcaagacgg agatgcatgg cctctaagag tgcccgtgtc
12001 ggttcttcct ggaagttgac tttccttaga cccgccaggt caagttagcc gcgtgacgga
12061 catccaggcg tgggacgtgg tcagggcagg gctcattcat tgcccactag gatcccactg
12121 gcgaagatgg tctccatatc agctctctgc agaagggagg aagactttat catgttccta
12181 aaaatctgtg gcaagcaccc atcgtattat ccaaattttg ttgcaaatgt gattaatttg
12241 gttgtcaagt tttgggggtg ggctgtgggg agattgcttt tgttttcctg ctggtaatat
12301 cgggaaagat tttaatgaaa ccagggtaga attgtttggc aatgcactga agcgtgtttc
12361 tttcccaaaa tgtgcctccc ttccgctgcg ggcccagctg agtctatgta ggtgatgttt
12421 ccagctgcca agtgctcttt gttactgtcc accctcattt ctgccagcgc atgtgtcctt
12481 tcaaggggaa aatgtgaagc tgaaccccct ccagacaccc agaatgtagc atctgagaag
12541 gccctgtgcc ctaaaggaca cccctcgccc ccatcttcat ggagggggtc atttcagagc
12601 cctcggagcc aatgaacagc tcctcctctt ggagctgaga tgagccccac gtggagctcg
12661 ggacggatag tagacagcaa taactcggtg tgtggccgcc tggcaggtgg aacttcctcc
12721 cgttgcgggg tggagtgagg ttagttctgt gtgtctggtg ggtggagtca ggcttctctt
12781 gctacctgtg agcatccttc ccagcagaca tcctcatcgg gctttgtccc tcccccgctt
12841 cctccctctg cggggaggac ccgggaccac agctgctggc cagggtagac ttggagctgt
12901 cctccagagg ggtcacgtgt aggagtgaga agaaggaaga tcttgagagc tgctgaggga
12961 ccttggagag ctcaggatgg ctcagacgag gacactcgct tgccgggcct gggcctcctg
13021 ggaaggaggg agctgctcag aatgccgcat gacaactgaa ggcaacctgg aaggttcagg
13081 ggccgctctt cccccatgtg cctgtcacgc tctggtgcag tcaaaggaac gccttcccct
13141 cagttgtttc taagagcaga gtctcccgct gcaatctggg tggtaactgc cagccttgga
13201 ggatcgtggc caacgtggac ctgcctacgg agggtgggct ctgacccaag tggggcctcc
13261 ttgtccaggt ctcactgctt tgcaccgtgg tcagagggac tgtcagctga gcttgagctc
13321 ccctggagcc agcagggctg tgatgggcga gtcccggagc cccacccaga cctgaatgct
13381 tctgagagca aagggaagga ctgacgagag atgtatattt aattttttaa ctgctgcaaa
13441 cattgtacat ccaaattaaa ggaaaaaaat ggaaaccatc aaaaaaaaaa aaaaaaaa
```

[0078] In some embodiments, an HTT RNAi agent includes an antisense strand wherein position 19 of the antisense strand (5′→3′) is capable of forming a base pair with position 1 of a 19-mer target sequence disclosed in Table 1. In some embodiments, an HTT agent includes an antisense strand wherein position 1 of the antisense strand (5′→3′) is capable of forming a base pair with position 19 of a 19-mer target sequence disclosed in Table 1.

[0079] In some embodiments, an HTT agent includes an antisense strand wherein position 2 of the antisense strand (5′→3′) is capable of forming a base pair with position 18 of a 19-mer target sequence disclosed in Table 1. In some embodiments, an HTT agent includes an antisense strand wherein positions 2 through 18 of the antisense strand (5′→3′) are capable of forming base pairs with each of the respective complementary bases located at positions 18 through 2 of the 19-mer target sequence disclosed in Table 1.

[0080] For the RNAi agents disclosed herein, the nucleotide at position 1 of the antisense strand (from 5′ end→3′ end) can be perfectly complementary to an HTT gene, or can be non-complementary to an HTT gene. In some embodiments, the nucleotide at position 1 of the antisense strand (from 5′ end→3′ end) is a U, A, or dT. In some embodiments, the nucleotide at position 1 of the antisense strand (from 5′ end→3′ end) forms an A:U or U:A base pair with the sense strand.

[0081] In some embodiments, an HTT RNAi agent antisense strand comprises the sequence of nucleotides (from 5′ end→3′ end) 2-18 or 2-19 of any of the antisense strand sequences in Table 2 or Table 3. In some embodiments, an HTT RNAi sense strand comprises the sequence of nucleotides (from 5′ end→3′ end) 1-17, 1-18, or 2-18 of any of the sense strand sequences in Table 2, Table 4, Table 5, or Table 6.

[0082] In some embodiments, an HTT RNAi agent is comprised of (i) an antisense strand comprising the sequence of nucleotides (from 5′ end→3′ end) 2-18 or 2-19 of any of the antisense strand sequences in Table 2 or Table 3, and (ii) a sense strand comprising the sequence of nucleotides (from 5′ end→3′ end) 1-17 or 1-18 of any of the sense strand sequences in Table 2, Table 4, Table 5, or Table 6.

[0083] In some embodiments, the HTT RNAi agents include core 19-mer nucleotide sequences shown in the following Table 2.

TABLE 2
HTT RNAi Agent Antisense Strand and Sense Strand Core Stretch Base
Sequences(N = any nucleobase; I = inosine (hypoxanthine nucleobase)

| | Antisense Strand | | Sense Strand | | |
|---|---|---|---|---|---|
| | Base Sequence | | Base Sequence | Corresponding | |
| | (5′ → 3′) | | (5′ → 3′) | Positions of | |
| SEQ | (Shown as an | SEQ | (Shown as an | Identified | Targeted |
| ID | Unmodified | ID | Unmodified | Sequence on | Gene |
| NO:. | Nucleotide Sequence) | NO:. | Nucleotide Sequence) | SEQ ID NO: 1 | Position |
| 86 | GGUAAAAGCAGAACCUGAG | 269 | CUCAGGUUCUGCUUUUACC | 32-50 | 30 |
| 87 | UGUAAAAGCAGAACCUGAG | 270 | CUCAGGUUCUGCUUUUACA | 32-50 | 30 |
| 88 | AGUAAAAGCAGAACCUGAG | 271 | CUCAGGUUCUGCUUUUACU | 32-50 | 30 |
| 89 | NGUAAAAGCAGAACCUGAG | 272 | CUCAGGUUCUGCUUUUACN | 32-50 | 30 |
| 90 | NGUAAAAGCAGAACCUGAN | 273 | NUCAGGUUCUGCUUUUACN | 32-50 | 30 |
| 91 | CAUCAGCUUUUCCAGGGUC | 274 | GACCCUGGAAAAGCUGAUG | 151-169 | 149 |
| 92 | UAUCAGCUUUUCCAGGGUC | 275 | GACCCUGGAAAAGCUGAUA | 151-169 | 149 |
| 93 | AAUCAGCUUUUCCAGGGUC | 276 | GACCCUGGAAAAGCUGAUU | 151-169 | 149 |
| 94 | NAUCAGCUUUUCCAGGGUC | 277 | GACCCUGGAAAAGCUGAUN | 151-169 | 149 |
| 95 | NAUCAGCUUUUCCAGGGUN | 278 | NACCCUGGAAAAGCUGAUN | 151-169 | 149 |
| 96 | UCAUCAGCUUUUCCAGGGU | 279 | ACCCUGGAAAAGCUGAUGA | 152-170 | 150 |
| 97 | ACAUCAGCUUUUCCAGGGU | 280 | ACCCUGGAAAAGCUGAUGU | 152-170 | 150 |
| 98 | NCAUCAGCUUUUCCAGGGU | 281 | ACCCUGGAAAAGCUGAUGN | 152-170 | 150 |
| 99 | NCAUCAGCUUUUCCAGGGN | 282 | NCCCUGGAAAAGCUGAUGN | 152-170 | 150 |
| 100 | UUCAUCAGCUUUUCCAGGG | 283 | CCCUGGAAAAGCUGAUGAA | 153-171 | 151 |
| 101 | AUCAUCAGCUUUUCCAGGG | 284 | CCCUGGAAAAGCUGAUGAU | 153-171 | 151 |
| 102 | NUCAUCAGCUUUUCCAGGG | 285 | CCCUGGAAAAGCUGAUGAN | 153-171 | 151 |
| 103 | NUCAUCAGCUUUUCCAGGN | 286 | NCCUGGAAAAGCUGAUGAN | 153-171 | 151 |
| 104 | AGGCCUUCAUCAGCUUUUC | 287 | GAAAAGCUGAUGAAGGCCU | 158-176 | 156 |
| 105 | UGGCCUUCAUCAGCUUUUC | 288 | GAAAAGCUGAUGAAGGCCA | 158-176 | 156 |
| 106 | NGGCCUUCAUCAGCUUUUC | 289 | GAAAAGCUGAUGAAGGCCN | 158-176 | 156 |
| 107 | NGGCCUUCAUCAGCUUUUN | 290 | NAAAAGCUGAUGAAGGCCN | 158-176 | 156 |
| 108 | GACUCGAAGGCCUUCAUCA | 291 | UGAUGAAGGCCUUCGAGUC | 165-183 | 163 |
| 109 | UACUCGAAGGCCUUCAUCA | 292 | UGAUGAAGGCCUUCGAGUA | 165-183 | 163 |
| 110 | AACUCGAAGGCCUUCAUCA | 293 | UGAUGAAGGCCUUCGAGUU | 165-183 | 163 |
| 111 | NACUCGAAGGCCUUCAUCA | 294 | UGAUGAAGGCCUUCGAGUN | 165-183 | 163 |
| 112 | NACUCGAAGGCCUUCAUCN | 295 | NGAUGAAGGCCUUCGAGUN | 165-183 | 163 |
| 113 | GGACUCGAAAGCCUUCAUC | 296 | GAUGAAGGCCUUCGAGUCC | 166-184 | 164 |
| 114 | UGACUCGAAAGCCUUCAUC | 297 | GAUGAAGGCCUUCGAGUCA | 166-184 | 164 |
| 115 | AGACUCGAAAGCCUUCAUC | 298 | GAUGAAGGCCUUCGAGUCU | 166-184 | 164 |
| 116 | NGACUCGAAAGCCUUCAUC | 299 | GAUGAAGGCCUUCGAGUCN | 166-184 | 164 |
| 117 | NGACUCGAAAGCCUUCAUN | 300 | NAUGAAGGCCUUCGAGUCN | 166-184 | 164 |
| 118 | GACUUGAGGGACUCGAAGG | 301 | CCUUCGAGUCCCUCAAGUC | 174-192 | 172 |
| 119 | UACUUGAGGGACUCGAAGG | 302 | CCUUCGAGUCCCUCAAGUA | 174-192 | 172 |
| 120 | AACUUGAGGGACUCGAAGG | 303 | CCUUCGAGUCCCUCAAGUU | 174-192 | 172 |
| 121 | NACUUGAGGGACUCGAAGG | 304 | CCUUCGAGUCCCUCAAGUN | 174-192 | 172 |
| 122 | NACUUGAGGGACUCGAAGN | 305 | NCUUCGAGUCCCUCAAGUN | 174-192 | 172 |
| 123 | GGACUUGAGGGACUCGAAG | 306 | CUUCGAGUCCCUCAAGUCC | 175-193 | 173 |
| 124 | UGACUUGAGGGACUCGAAG | 307 | CUUCGAGUCCCUCAAGUCA | 175-193 | 173 |
| 125 | AGACUUGAGGGACUCGAAG | 308 | CUUCGAGUCCCUCAAGUCU | 175-193 | 173 |
| 126 | NGACUUGAGGGACUCGAAG | 309 | CUUCGAGUCCCUCAAGUCN | 175-193 | 173 |
| 127 | NGACUUGAGGGACUCGAAN | 310 | NUUCGAGUCCCUCAAGUCN | 175-193 | 173 |
| 128 | CUUUCUUUGGUCGGUGCAG | 311 | CUGCACCGACCAAAGAAAG | 404-422 | 402 |
| 129 | UUUUCUUUGGUCGGUGCAG | 312 | CUGCACCGACCAAAGAAAA | 404-422 | 402 |
| 130 | AUUUCUUUGGUCGGUGCAG | 313 | CUGCACCGACCAAAGAAAU | 404-422 | 402 |
| 131 | NUUUCUUUGGUCGGUGCAG | 314 | CUGCACCGACCAAAGAAAN | 404-422 | 402 |
| 132 | NUUUCUUUGGUCGGUGCAN | 315 | NUGCACCGACCAAAGAAAN | 404-422 | 402 |
| 133 | UCUUUCUUUGGUCGGUGCA | 316 | UGCACCGACCAAAGAAAGA | 405-423 | 403 |
| 134 | ACUUUCUUUGGUCGGUGCA | 317 | UGCACCGACCAAAGAAAGU | 405-423 | 403 |
| 135 | NCUUUCUUUGGUCGGUGCA | 318 | UGCACCGACCAAAGAAAGN | 405-423 | 403 |
| 136 | NCUUUCUUUGGUCGGUGCN | 319 | NGCACCGACCAAAGAAAGN | 405-423 | 403 |
| 137 | UUCUUUCUUUGGUCGGUGC | 320 | GCACCGACCAAAGAAAGAA | 406-424 | 404 |
| 138 | AUCUUUCUUUGGUCGGUGC | 321 | GCACCGACCAAAGAAAGAU | 406-424 | 404 |
| 139 | NUCUUUCUUUGGUCGGUGC | 322 | GCACCGACCAAAGAAAGAN | 406-424 | 404 |
| 140 | NUCUUUCUUUGGUCGGUGN | 323 | NCACCGACCAAAGAAAGAN | 406-424 | 404 |
| 141 | AGAAAAAGUUCCAUAGCGA | 324 | UCGCUAUGGAACUUUUUCU | 531-549 | 529 |
| 142 | UGAAAAAGUUCCAUAGCGA | 325 | UCGCUAUGGAACUUUUUCA | 531-549 | 529 |
| 143 | NGAAAAAGUUCCAUAGCGA | 326 | UCGCUAUGGAACUUUUUCN | 531-549 | 529 |
| 144 | NGAAAAAGUUCCAUAGCGN | 327 | NCGCUAUGGAACUUUUUCN | 531-549 | 529 |
| 145 | AAGAUUAGAAUCCAUCAAA | 328 | UUUGAUGGAUUCUAAUCUU | 622-640 | 620 |
| 146 | UAGAUUAGAAUCCAUCAAA | 329 | UUUGAUGGAUUCUAAUCUA | 622-640 | 620 |
| 147 | NAGAUUAGAAUCCAUCAAA | 330 | UUUGAUGGAUUCUAAUCUN | 622-640 | 620 |
| 148 | NAGAUUAGAAUCCAUCAAN | 331 | NUUGAUGGAUUCUAAUCUN | 622-640 | 620 |
| 149 | CUUGGAAGAUUAGAAUCCA | 332 | UGGAUUCUAAUCUUCCAAG | 627-645 | 625 |
| 150 | UUUGGAAGAUUAGAAUCCA | 333 | UGGAUUCUAAUCUUCCAAA | 627-645 | 625 |
| 151 | AUUGGAAGAUUAGAAUCCA | 334 | UGGAUUCUAAUCUUCCAAU | 627-645 | 625 |
| 152 | NUUGGAAGAUUAGAAUCCA | 335 | UGGAUUCUAAUCUUCCAAN | 627-645 | 625 |
| 153 | NUUGGAAGAUUAGAAUCCN | 336 | NGGAUUCUAAUCUUCCAAN | 627-645 | 625 |
| 154 | UUGUCAUUUGCAAAAUUGC | 337 | GCAAUUUUGCAAAUGACAA | 870-888 | 868 |
| 155 | AUGUCAUUUGCAAAAUUGC | 338 | GCAAUUUUGCAAAUGACAU | 870-888 | 868 |
| 156 | NUGUCAUUUGCAAAAUUGC | 339 | GCAAUUUUGCAAAUGACAN | 870-888 | 868 |
| 157 | NUGUCAUUUGCAAAAUUGN | 340 | NCAAUUUUGCAAAUGACAN | 870-888 | 868 |
| 158 | CUGUGUAUGAUGUAACGUC | 341 | GACGUUACAUCAUACACAG | 1231-1249 | 1229 |
| 159 | UUGUGUAUGAUGUAACGUC | 342 | GACGUUACAUCAUACACAA | 1231-1249 | 1229 |
| 160 | AUGUGUAUGAUGUAACGUC | 343 | GACGUUACAUCAUACACAU | 1231-1249 | 1229 |
| 161 | NUGUGUAUGAUGUAACGUC | 344 | GACGUUACAUCAUACACAN | 1231-1249 | 1229 |
| 162 | NUGUGUAUGAUGUAACGUN | 345 | NACGUUACAUCAUACACAN | 1231-1249 | 1229 |
| 163 | ACAACAUUGUGGUCUUGGU | 346 | ACCAAGACCACAAUGUUGU | 1251-1269 | 1249 |
| 164 | UCAACAUUGUGGUCUUGGU | 347 | ACCAAGACCACAAUGUUGA | 1251-1269 | 1249 |
| 165 | NCAACAUUGUGGUCUUGGU | 348 | ACCAAGACCACAAUGUUGN | 1251-1269 | 1249 |
| 166 | NCAACAUUGUGGUCUUGGN | 349 | NCCAAGACCACAAUGUUGN | 1251-1269 | 1249 |
| 167 | GCUAUAAGUUCCACAAUAC | 350 | GUAUUGUGGAACUUAUAGC | 1407-1425 | 1405 |
| 168 | UCUAUAAGUUCCACAAUAC | 351 | GUAUUGUGGAACUUAUAGA | 1407-1425 | 1405 |
| 169 | ACUAUAAGUUCCACAAUAC | 352 | GUAUUGUGGAACUUAUAGU | 1407-1425 | 1405 |
| 170 | NCUAUAAGUUCCACAAUAC | 353 | GUAUUGUGGAACUUAUAGN | 1407-1425 | 1405 |
| 171 | NCUAUAAGUUCCACAAUAN | 354 | NUAUUGUGGAACUUAUAGN | 1407-1425 | 1405 |
| 172 | CCAUGAUCGAUGUAGUUCA | 355 | UGAACUACAUCGAUCAUGG | 2412-2430 | 2410 |
| 173 | UCAUGAUCGAUGUAGUUCA | 356 | UGAACUACAUCGAUCAUGA | 2412-2430 | 2410 |
| 174 | ACAUGAUCGAUGUAGUUCA | 357 | UGAACUACAUCGAUCAUGU | 2412-2430 | 2410 |
| 175 | NCAUGAUCGAUGUAGUUCA | 358 | UGAACUACAUCGAUCAUGN | 2412-2430 | 2410 |
| 176 | NCAUGAUCGAUGUAGUUCN | 359 | NGAACUACAUCGAUCAUGN | 2412-2430 | 2410 |
| 177 | CACAAAGCUUCACAGCAUC | 360 | GAUGCUGUGAAGCUUUGUG | 3222-3240 | 3220 |
| 178 | UACAAAGCUUCACAGCAUC | 361 | GAUGCUGUGAAGCUUUGUA | 3222-3240 | 3220 |
| 179 | AACAAAGCUUCACAGCAUC | 362 | GAUGCUGUGAAGCUUUGUU | 3222-3240 | 3220 |
| 180 | NACAAAGCUUCACAGCAUC | 363 | GAUGCUGUGAAGCUUUGUN | 3222-3240 | 3220 |
| 181 | NACAAAGCUUCACAGCAUN | 364 | NAUGCUGUGAAGCUUUGUN | 3222-3240 | 3220 |
| 182 | UACUUGUUGUAACAGGACC | 365 | GGUCCUGUUACAACAAGUA | 3800-3818 | 3798 |
| 183 | AACUUGUUGUAACAGGACC | 366 | GGUCCUGUUACAACAAGUU | 3800-3818 | 3798 |
| 184 | NACUUGUUGUAACAGGACC | 367 | GGUCCUGUUACAACAAGUN | 3800-3818 | 3798 |
| 185 | NACUUGUUGUAACAGGACN | 368 | NGUCCUGUUACAACAAGUN | 3800-3818 | 3798 |
| 186 | GUGAUGAGGAUUUACUUGU | 369 | ACAAGUAAAUCCUCAUCAC | 3812-3830 | 3810 |
| 187 | UUGAUGAGGAUUUACUUGU | 370 | ACAAGUAAAUCCUCAUCAA | 3812-3830 | 3810 |
| 188 | AUGAUGAGGAUUUACUUGU | 371 | ACAAGUAAAUCCUCAUCAU | 3812-3830 | 3810 |
| 189 | NUGAUGAGGAUUUACUUGU | 372 | ACAAGUAAAUCCUCAUCAN | 3812-3830 | 3810 |
| 190 | NUGAUGAGGAUUUACUUGN | 373 | NCAAGUAAAUCCUCAUCAN | 3812-3830 | 3810 |
| 191 | ACAAACAGUUGCCAUCAUU | 374 | AAUGAUGGCAACUGUUUGU | 4066-4084 | 4064 |
| 192 | UCAAACAGUUGCCAUCAUU | 375 | AAUGAUGGCAACUGUUUGA | 4066-4084 | 4064 |
| 193 | NCAAACAGUUGCCAUCAUU | 376 | AAUGAUGGCAACUGUUUGN | 4066-4084 | 4064 |
| 194 | NCAAACAGUUGCCAUCAUN | 377 | NAUGAUGGCAACUGUUUGN | 4066-4084 | 4064 |
| 195 | UACAAAGCCAAUAAACACC | 378 | GGUGUUUAUUGGCUUUGUA | 4558-4576 | 4556 |
| 196 | AACAAAGCCAAUAAACACC | 379 | GGUGUUUAUUGGCUUUGUU | 4558-4576 | 4556 |
| 197 | NACAAAGCCAAUAAACACC | 380 | GGUGUUUAUUGGCUUUGUN | 4558-4576 | 4556 |
| 198 | NACAAAGCCAAUAAACACN | 381 | NGUGUUUAUUGGCUUUGUN | 4558-4576 | 4556 |
| 199 | AGGAAUUCCAAUGAUCUGU | 382 | ACAGAUCAUUGGAAUUCCU | 4687-4705 | 4685 |
| 200 | UGGAAUUCCAAUGAUCUGU | 383 | ACAGAUCAUUGGAAUUCCA | 4687-4705 | 4685 |
| 201 | NGGAAUUCCAAUGAUCUGU | 384 | ACAGAUCAUUGGAAUUCCN | 4687-4705 | 4685 |
| 202 | NGGAAUUCCAAUGAUCUGN | 385 | NCAGAUCAUUGGAAUUCCN | 4687-4705 | 4685 |
| 203 | UAUCUGUCGAGACAGUCGC | 386 | GCGACUGUCUCGACAGAUA | 4963-4981 | 4961 |
| 204 | AAUCUGUCGAGACAGUCGC | 387 | GCGACUGUCUCGACAGAUU | 4963-4981 | 4961 |
| 205 | NAUCUGUCGAGACAGUCGC | 388 | GCGACUGUCUCGACAGAUN | 4963-4981 | 4961 |
| 206 | NAUCUGUCGAGACAGUCGN | 389 | NCGACUGUCUCGACAGAUN | 4963-4981 | 4961 |
| 207 | CAGUUGAACAGUGCUCACG | 390 | CGUGAGCACUGUUCAACUG | 5146-5164 | 5144 |
| 208 | UAGUUGAACAGUGCUCACG | 391 | CGUGAGCACUGUUCAACUA | 5146-5164 | 5144 |
| 209 | AAGUUGAACAGUGCUCACG | 392 | CGUGAGCACUGUUCAACUU | 5146-5164 | 5144 |
| 210 | NAGUUGAACAGUGCUCACG | 393 | CGUGAGCACUGUUCAACUN | 5146-5164 | 5144 |
| 211 | NAGUUGAACAGUGCUCACN | 394 | NGUGAGCACUGUUCAACUN | 5146-5164 | 5144 |
| 212 | GACUAAGUAACUUUGUGCU | 395 | AGCACAAAGUUACUUAGUC | 5744-5762 | 5742 |
| 213 | UACUAAGUAACUUUGUGCU | 396 | AGCACAAAGUUACUUAGUA | 5744-5762 | 5742 |
| 214 | AACUAAGUAACUUUGUGCU | 397 | AGCACAAAGUUACUUAGUU | 5744-5762 | 5742 |
| 215 | NACUAAGUAACUUUGUGCU | 398 | AGCACAAAGUUACUUAGUN | 5744-5762 | 5742 |
| 216 | NACUAAGUAACUUUGUGCN | 399 | NGCACAAAGUUACUUAGUN | 5744-5762 | 5742 |
| 217 | GCACAUUCCAAGUUUGGCU | 400 | AGCCAAACUUGGAAUGUGC | 5800-5818 | 5798 |
| 218 | UCACAUUCCAAGUUUGGCU | 401 | AGCCAAACUUGGAAUGUGA | 5800-5818 | 5798 |
| 219 | ACACAUUCCAAGUUUGGCU | 402 | AGCCAAACUUGGAAUGUGU | 5800-5818 | 5798 |
| 220 | NCACAUUCCAAGUUUGGCU | 403 | AGCCAAACUUGGAAUGUGN | 5800-5818 | 5798 |
| 221 | NCACAUUCCAAGUUUGGCN | 404 | NGCCAAACUUGGAAUGUGN | 5800-5818 | 5798 |
| 222 | CGUACUAUUUCUCUAUUGC | 405 | GCAAUAGAGAAAUAGUACG | 5817-5835 | 5815 |
| 223 | UGUACUAUUUCUCUAUUGC | 406 | GCAAUAGAGAAAUAGUACA | 5817-5835 | 5815 |
| 224 | AGUACUAUUUCUCUAUUGC | 407 | GCAAUAGAGAAAUAGUACU | 5817-5835 | 5815 |
| 225 | NGUACUAUUUCUCUAUUGC | 408 | GCAAUAGAGAAAUAGUACN | 5817-5835 | 5815 |
| 226 | NGUACUAUUUCUCUAUUGN | 409 | NCAAUAGAGAAAUAGUACN | 5817-5835 | 5815 |
| 227 | GUUCUGACAGACAUAAUCA | 410 | UGAUUAUGUCUGUCAGAAC | 5860-5878 | 5858 |
| 228 | UUUCUGACAGACAUAAUCA | 411 | UGAUUAUGUCUGUCAGAAA | 5860-5878 | 5858 |
| 229 | AUUCUGACAGACAUAAUCA | 412 | UGAUUAUGUCUGUCAGAAU | 5860-5878 | 5858 |
| 230 | NUUCUGACAGACAUAAUCA | 413 | UGAUUAUGUCUGUCAGAAN | 5860-5878 | 5858 |
| 231 | NUUCUGACAGACAUAAUCN | 414 | NGAUUAUGUCUGUCAGAAN | 5860-5878 | 5858 |
| 232 | GAGUCAUGGAGGUUCUGAC | 415 | GUCAGAACCUCCAUGACUC | 5871-5889 | 5869 |
| 233 | UAGUCAUGGAGGUUCUGAC | 416 | GUCAGAACCUCCAUGACUA | 5871-5889 | 5869 |
| 234 | AAGUCAUGGAGGUUCUGAC | 417 | GUCAGAACCUCCAUGACUU | 5871-5889 | 5869 |
| 235 | NAGUCAUGGAGGUUCUGAC | 418 | GUCAGAACCUCCAUGACUN | 5871-5889 | 5869 |
| 236 | NAGUCAUGGAGGUUCUGAN | 419 | NUCAGAACCUCCAUGACUN | 5871-5889 | 5869 |
| 237 | UGAAUGUGAUUUACAAUGA | 420 | UCAUUGUAAAUCACAUUCA | 5907-5925 | 5905 |
| 238 | AGAAUGUGAUUUACAAUGA | 421 | UCAUUGUAAAUCACAUUCU | 5907-5925 | 5905 |
| 239 | NGAAUGUGAUUUACAAUGA | 422 | UCAUUGUAAAUCACAUUCN | 5907-5925 | 5905 |
| 240 | NGAAUGUGAUUUACAAUGN | 423 | NCAUUGUAAAUCACAUUCN | 5907-5925 | 5905 |
| 241 | CACUGAUGAAGUCCUGUAC | 424 | GUACAGGACUUCAUCAGUG | 5957-5975 | 5955 |
| 242 | UACUGAUGAAGUCCUGUAC | 425 | GUACAGGACUUCAUCAGUA | 5957-5975 | 5955 |
| 243 | AACUGAUGAAGUCCUGUAC | 426 | GUACAGGACUUCAUCAGUU | 5957-5975 | 5955 |
| 244 | NACUGAUGAAGUCCUGUAC | 427 | GUACAGGACUUCAUCAGUN | 5957-5975 | 5955 |
| 245 | NACUGAUGAAGUCCUGUAN | 428 | NUACAGGACUUCAUCAGUN | 5957-5975 | 5955 |
| 246 | CACAACGAGACUGAAUUGC | 429 | GCAAUUCAGUCUCGUUGUG | 6017-6035 | 6015 |
| 247 | UACAACGAGACUGAAUUGC | 430 | GCAAUUCAGUCUCGUUGUA | 6017-6035 | 6015 |
| 248 | AACAACGAGACUGAAUUGC | 431 | GCAAUUCAGUCUCGUUGUU | 6017-6035 | 6015 |
| 249 | NACAACGAGACUGAAUUGC | 432 | GCAAUUCAGUCUCGUUGUN | 6017-6035 | 6015 |
| 250 | NACAACGAGACUGAAUUGN | 433 | NCAAUUCAGUCUCGUUGUN | 6017-6035 | 6015 |
| 251 | UUGAGUUCUUCCAUUGGCA | 434 | UGCCAAUGGAAGAACUCAA | 6243-6261 | 6241 |
| 252 | AUGAGUUCUUCCAUUGGCA | 435 | UGCCAAUGGAAGAACUCAU | 6243-6261 | 6241 |
| 253 | NUGAGUUCUUCCAUUGGCA | 436 | UGCCAAUGGAAGAACUCAN | 6243-6261 | 6241 |
| 254 | NUGAGUUCUUCCAUUGGCN | 437 | NGCCAAUGGAAGAACUCAN | 6243-6261 | 6241 |
| 255 | GACUAAGUGAGUCUUGCAU | 438 | AUGCAAGACUCACUUAGUC | 6350-6368 | 6348 |
| 256 | UACUAAGUGAGUCUUGCAU | 439 | AUGCAAGACUCACUUAGUA | 6350-6368 | 6348 |
| 257 | AACUAAGUGAGUCUUGCAU | 440 | AUGCAAGACUCACUUAGUU | 6350-6368 | 6348 |
| 258 | NACUAAGUGAGUCUUGCAU | 441 | AUGCAAGACUCACUUAGUN | 6350-6368 | 6348 |
| 259 | NACUAAGUGAGUCUUGCAN | 442 | NUGCAAGACUCACUUAGUN | 6350-6368 | 6348 |
| 260 | CCAGAAAUUUCACUCAUCC | 443 | GGAUGAGUGAAAUUUCUGG | 6606-6624 | 6604 |
| 261 | UCAGAAAUUUCACUCAUCC | 444 | GGAUGAGUGAAAUUUCUGA | 6606-6624 | 6604 |
| 262 | ACAGAAAUUUCACUCAUCC | 445 | GGAUGAGUGAAAUUUCUGU | 6606-6624 | 6604 |
| 263 | NCAGAAAUUUCACUCAUCC | 446 | GGAUGAGUGAAAUUUCUGN | 6606-6624 | 6604 |
| 264 | NCAGAAAUUUCACUCAUCN | 447 | NGAUGAGUGAAAUUUCUGN | 6606-6624 | 6604 |
| 265 | AGAUCAUUCAAUUUGCUCC | 448 | GGAGCAAGUUGAAUGAUCU | 6756-6774 | 6754 |
| 266 | UGAUCAUUCAAUUUGCUCC | 449 | GGAGCAAGUUGAAUGAUCA | 6756-6774 | 6754 |
| 267 | NGAUCAUUCAAUUUGCUCC | 450 | GGAGCAAGUUGAAUGAUCN | 6756-6774 | 6754 |
| 268 | NGAUCAUUCAAUUUGCUCN | 451 | NGAGCAAGUUGAAUGAUCN | 6756-6774 | 6754 |

[0084] The HTT RNAi agent sense strands and antisense strands that comprise or consist of the nucleotide sequences in Table 2 can be modified nucleotides or unmodified nucleotides. In some embodiments, the HTT RNAi agents having the sense and antisense strand sequences that comprise or consist of any of the nucleotide sequences in Table 2 are all or substantially all modified nucleotides.

[0085] In some embodiments, the antisense strand of an HTT RNAi agent disclosed herein differs by 0, 1, 2, or 3 nucleotides from any of the antisense strand sequences in Table 2. In some embodiments, the sense strand of an HTT RNAi agent disclosed herein differs by 0, 1, 2, or 3 nucleotides from any of the sense strand sequences in Table 2.

[0086] As used herein, each N listed in a sequence disclosed in Table 2 may be independently selected from any and all nucleobases (including those found on both modified and unmodified nucleotides). In some embodiments, an N nucleotide listed in a sequence disclosed in Table 2 has a nucleobase that is complementary to the N nucleotide at the corresponding position on the other strand. In some embodiments, an N nucleotide listed in a sequence disclosed in Table 2 has a nucleobase that is not complementary to the N nucleotide at the corresponding position on the other strand. In some embodiments, an N nucleotide listed in a sequence disclosed in Table 2 has a nucleobase that is the same as the N nucleotide at the corresponding position on the other strand. In some embodiments, an N nucleotide listed in a sequence disclosed in Table 2 has a nucleobase that is different from the N nucleotide at the corresponding position on the other strand.

[0087] Certain modified HTT RNAi agent sense and antisense strands are provided in Table 3, Table 4, Table 5, Table 6, and Table 9. Certain modified HTT RNAi agent antisense strands, as well as their underlying unmodified nucleobase sequences, are provided in Table 3. Certain modified HTT RNAi agent sense strands, as well as their underlying unmodified nucleobase sequences, are provided in Tables 4, 5, and 6. In forming HTT RNAi agents, each of the nucleotides in each of the underlying base sequences listed in Tables 3, 4, 5, and 6, as well as in Table 2, above, can be a modified nucleotide.

[0088] The HTT RNAi agents described herein are formed by annealing an antisense strand with a sense strand. A sense strand containing a sequence listed in Table 2, Table 4, Table 5, or Table 6 can be hybridized to any antisense strand containing a sequence listed in Table 2 or Table 3, provided the two sequences have a region of at least 85% complementarity over a contiguous 16, 17, 18, 19, 20, or 21 nucleotide sequence.

[0089] In some embodiments, an HTT RNAi agent antisense strand comprises a nucleotide sequence of any of the sequences in Table 2 or Table 3.

[0090] In some embodiments, an HTT RNAi agent comprises or consists of a duplex having the nucleobase sequences of the sense strand and the antisense strand of any of the sequences in Table 2, Table 3, Table 4, Table 5, Table 6, or Table 9.

[0091] Examples of antisense strands containing modified nucleotides are provided in Table 3. Examples of sense strands containing modified nucleotides are provided in Tables 4, 5 and 6.

[0092] As used in Tables 3, 4, 5, 6, and 9, the following notations are used to indicate modified nucleotides, targeting groups, and linking groups:
[0093] A=adenosine-3′-phosphate
[0094] C=cytidine-3′-phosphate
[0095] G=guanosine-3′-phosphate
[0096] U=uridine-3′-phosphate
[0097] I=inosine-3′-phosphate
[0098] a=2′-O-methyladenosine-3′-phosphate
[0099] as =2′-O-methyladenosine-3′-phosphorothioate
[0100] c=2′-O-methylcytidine-3′-phosphate
[0101] cs=2′-O-methylcytidine-3′-phosphorothioate
[0102] g=2′-O-methylguanosine-3′-phosphate
[0103] gs=2′-O-methylguanosine-3′-phosphorothioate
[0104] i=2′-O-methylinosine-3′-phosphate
[0105] is=2′-O-methylinosine-3′-phosphorothioate
[0106] t=2′-O-methyl-5-methyluridine-3′-phosphate
[0107] is=2′-O-methyl-5-methyluridine-3′-phosphorothioate
[0108] u=2′-O-methyluridine-3′-phosphate
[0109] us=2′-O-methyluridine-3′-phosphorothioate
[0110] Af=2′-fluoroadenosine-3′-phosphate
[0111] Afs=2′-fluoroadenosine-3′-phosporothioate
[0112] Cf=2′-fluorocytidine-3′-phosphate
[0113] Cfs=2′-fluorocytidine-3′-phosphorothioate
[0114] Gf=2′-fluoroguanosine-3′-phosphate
[0115] Gfs=2′-fluoroguanosine-3′-phosphorothioate
[0116] Tf=2′-fluoro-5′-methyluridine-3′-phosphate
[0117] Tfs=2′-fluoro-5′-methyluridine-3′-phosphorothioate
[0118] Uf=2′-fluorouridine-3′-phosphate
[0119] Ufs=2′-fluorouridine-3′-phosphorothioate
[0120] dT=2′-deoxythymidine-3′-phosphate
[0121] A_{UNA}=2′,3′-seco-adenosine-3′-phosphate
[0122] A_{UNAS}=2′,3′-seco-adenosine-3′-phosphorothioate
[0123] C_{UNA}=2′,3′-seco-cytidine-3′-phosphate
[0124] C_{UNAS}=2′,3′-seco-cytidine-3′-phosphorothioate
[0125] G_{UNA}=2′,3′-seco-guanosine-3′-phosphate
[0126] G_{UNAS}=2′,3′-seco-guanosine-3′-phosphorothioate
[0127] U_{UNA}=2′,3′-seco-uridine-3′-phosphate
[0128] U_{UNAS}=2′,3′-seco-uridine-3′-phosphorothioate
[0129] a_2N=see Table 10
[0130] a_2Ns=see Table 10
[0131] (invAb)=inverted abasic deoxyribonucleotide-5′-phosphate, see Table 10
[0132] (invAb)s=inverted abasic deoxyribonucleotide-5′-phosphorothioate, see Table 10
[0133] s=phosphorothioate linkage
[0134] ss=phosphorodithioate linkage
[0135] p=terminal phosphate (as synthesized)
[0136] vpu=vinyl phosphonate 2′-O-methyluridine-3′-phosphate
[0137] cPrpa=5′-cyclopropyl phosphonate-2′-O-methyladenosine-3′-phosphate (see Table 10)
[0138] cPrpas=5′-cyclopropyl phosphonate-2′-O-methyladenosine-3′-phosphorothioate (see Table 10)
[0139] cPrpu=5′-cyclopropyl phosphonate-2′-O-methyluridine-3′-phosphate (see Table 10)
[0140] cPrpus=5′-cyclopropyl phosphonate-2′-O-methyluridine-3′-phosphorothioate (see Table 10)
[0141] (Alk-SS-C6)=see Table 10
[0142] (C6-SS-Alk)=see Table 10
[0143] (C6-SS-C6)=see Table 10
[0144] (6-SS-6)=see Table 10
[0145] (C6-SS-Alk-Me)=see Table 10
[0146] (NH2-C6)=see Table 10
[0147] (NH-C6)=see Table 10
[0148] (NH-C6)s=see Table 10
[0149] L20=see Table 10
[0150] L1026=see Table 10
[0151] [CP-1113]=Fabs were capped according to the procedure in Example 1E; (see also Table 10 for structure)
[0152] LP293=see Table 10
[0153] LP183=see Table 10
[0154] Fab0016=see Antigen Binding Proteins, infra
[0155] Fab0070=see Antigen Binding Proteins, infra

[0156] As the person of ordinary skill in the art would readily understand, unless otherwise indicated by the sequence (such as, for example, by a phosphorothioate linkage “s” or by a phosphorodithioate linkage “ss”), when present in an oligonucleotide, the nucleotide monomers are mutually linked by 5′-3′-phosphodiester bonds. As the person of ordinary skill in the art would clearly understand, the inclusion of a phosphorothioate or phosphorodithioate linkage as shown in the modified nucleotide sequences disclosed herein replaces the phosphodiester linkage typically present in oligonucleotides. Further, the person of ordinary skill in the art would readily understand that the terminal nucleotide at the 3′ end of a given oligonucleotide sequence would typically have a hydroxyl (—OH) group at the respective 3′ position of the given monomer instead of a phosphate moiety ex vivo. Additionally, for the embodiments disclosed herein, when viewing the respective strand 5′→3′, the inverted abasic residues are inserted such that the 3′ position of the deoxyribose is linked at the 3′ end of the preceding monomer on the respective strand (see, e.g., Table 10). Moreover, as the person of ordinary skill would readily understand and appreciate, while the phosphorothioate chemical structures depicted herein typically show the anion on the sulfur atom, the inventions disclosed herein encompass all phosphorothioate tautomers (e.g., where the sulfur atom has a double-bond and the anion is on an oxygen atom). Unless expressly indicated otherwise herein, such understandings of the person of ordinary skill in the art are used when describing the HTT RNAi agents and compositions of HTT RNAi agents disclosed herein.

[0157] Certain examples of antigen binding proteins and linking groups used with the HTT RNAi agents disclosed herein are included in the chemical structures provided below in Table 10. Each sense strand and/or antisense strand can have any antigen binding protein or linking group listed herein, as well as other targeting groups, antigen binding proteins, linking groups, conjugated to the 5′ and/or 3′ end of the sequence.

TABLE 3
HTT RNAi Agent Antisense Strand Sequences

| | | | Underlying Base Sequence | |
|---|---|---|---|---|
| AS | | SEQ | (5′ → 3′) | SEQ |
| Strand | Modified Antisense Strand | ID | (Shown as an Unmodified | ID |
| ID | (5′ → 3′) | NO. | Nucleotide Sequence) | NO. |
| CA005452 | cPrpusAfscaacGfagacUfgAfaUfugccsu | 452 | UACAACGAGACUGAAUUGCCU | 879 |
| CA005655 | cPrpasGfsaucaUfucaaCfuUfgCfuccasg | 453 | AGAUCAUUCAACUUGCUCCAG | 880 |
| CA005656 | cPrpusAfscuaaGfugagUfcUfuGfcaugsg | 454 | UACUAAGUGAGUCUUGCAUGG | 881 |
| CA005667 | cPrpasGfsaucaUfucaaCfuUfgCfuccassg | 455 | AGAUCAUUCAACUUGCUCCAG | 880 |
| CA005668 | cPrpusAfscuaaGfugagUfcUfuGfcaugssg | 456 | UACUAAGUGAGUCUUGCAUGG | 881 |
| CA005669 | cPrpusAfscaacGfagacUfgAfaUfugccssu | 457 | UACAACGAGACUGAAUUGCCU | 879 |
| CA006561 | cPrpusGfsasCfuCfgaaagCfcUfuCfaUfcasg | 460 | UGACUCGAAAGCCUUCAUCAG | 883 |
| CA006699 | cPrpasGfsauCfauucaaCfuUfgCfuccassg | 461 | AGAUCAUUCAACUUGCUCCAG | 880 |
| CA006701 | cPrpusGfsaucaUfucaaCfuUfgCfuccassg | 462 | UGAUCAUUCAACUUGCUCCAG | 884 |
| CA006702 | cPrpisGfsaucaUfucaaCfuUfgCfuccassg | 463 | IGAUCAUUCAACUUGCUCCAG | 885 |
| CA006706 | cPrpasGfsaucaU_{UNA}ucaaCfuUfgCfuccassg | 464 | AGAUCAUUCAACUUGCUCCAG | 880 |
| CA006707 | cPrpasGfsaucA_{UNA}UfucaaCfuUfgCfuccassg | 465 | AGAUCAUUCAACUUGCUCCAG | 880 |
| CA006709 | cPrpasGfsaucaUfucaaUfuUfgCfuccassg | 466 | AGAUCAUUCAAUUUGCUCCAG | 886 |
| CA006710 | cPrpasGfsaucaUfucaaCfuUfgUfuccassg | 467 | AGAUCAUUCAACUUGUUCCAG | 887 |
| CA006711 | cPrpusAfscaAfcgagacUfgAfaUfugccssu | 468 | UACAACGAGACUGAAUUGCCU | 879 |
| CA006715 | cPrpusAfscaacG_{UNA}agacUfgAfaUfugccssu | 469 | UACAACGAGACUGAAUUGCCU | 879 |
| CA006716 | cPrpusAfscaaC_{UNA}GfagacUfgAfaUfugccssu | 470 | UACAACGAGACUGAAUUGCCU | 879 |
| CA006718 | cPrpusAfscaauGfagacUfgAfaUfugccssu | 471 | UACAAUGAGACUGAAUUGCCU | 888 |
| CA006721 | cPrpussAfcaacGfagacUfgAfaUfugccssu | 472 | UACAACGAGACUGAAUUGCCU | 879 |
| CA006722 | cPrpusAfscuAfagugagUfcUfuGfcaugssg | 473 | UACUAAGUGAGUCUUGCAUGG | 881 |
| CA006726 | cPrpusAfscuaaG_{UNA}ugagUfcUfuGfcaugssg | 474 | UACUAAGUGAGUCUUGCAUGG | 881 |
| CA006727 | cPrpusAfscuaA_{UNA}GfugagUfcUfuGfcaugssg | 475 | UACUAAGUGAGUCUUGCAUGG | 881 |
| CA006729 | cPrpusAfscuaaGfugagUfuUfuGfcaugssg | 476 | UACUAAGUGAGUUUUGCAUGG | 889 |
| CA006731 | cPrpusAfscuaaGfugagUfcUfuGfuaugssg | 477 | UACUAAGUGAGUCUUGUAUGG | 890 |
| CA006733 | cPrpussAfcuaaGfugagUfcUfuGfcaugssg | 478 | UACUAAGUGAGUCUUGCAUGG | 881 |
| CA006734 | cPrpasGfsauuaUfucaaCfuUfgCfuccassg | 479 | AGAUUAUUCAACUUGCUCCAG | 891 |
| CA008019 | cPrpisGfsauCfauucaaCfuUfgCfuccassg | 480 | IGAUCAUUCAACUUGCUCCAG | 885 |
| CA008021 | cPrpusGfsauCfauucaaCfuUfgCfuccassg | 481 | UGAUCAUUCAACUUGCUCCAG | 884 |
| CA911803 | cPrpasGfsgsAfaUfuccaaUfgAfuCfuGfuusu | 482 | AGGAAUUCCAAUGAUCUGUUU | 892 |
| CA911821 | cPrpusUfsusCfuGfacagaCfaUfaAfuCfacsa | 483 | UUUCUGACAGACAUAAUCACA | 893 |
| CA913562 | cPrpasGfsgsAfauuccaaUfgAfuCfuguusu | 484 | AGGAAUUCCAAUGAUCUGUUU | 892 |
| CA913563 | cPrpasGfsgsaAfuuccaaUfgAfuCfuguusu | 485 | AGGAAUUCCAAUGAUCUGUUU | 892 |
| CA913564 | cPrpasGfsgsaauUfccaaUfgAfuCfuguusu | 486 | AGGAAUUCCAAUGAUCUGUUU | 892 |
| CA913565 | cPrpasGfsgsaauucCfaaUfgAfuCfuguusu | 487 | AGGAAUUCCAAUGAUCUGUUU | 892 |
| CA913566 | cPrpasGfsgsAfaUfuccaaugAfuCfuguusu | 488 | AGGAAUUCCAAUGAUCUGUUU | 892 |
| CA913567 | cPrpasGfsgsaauuccaaugAfuCfuguusu | 489 | AGGAAUUCCAAUGAUCUGUUU | 892 |
| CA913568 | cPrpasGfsgsaauuccaaUfgAfucuguusu | 490 | AGGAAUUCCAAUGAUCUGUUU | 892 |
| CA913569 | cPrpasGfsgsaAfuuccaaugAfucuguusu | 491 | AGGAAUUCCAAUGAUCUGUUU | 892 |
| CA913570 | cPrpasGfsgsAfauU_{UNA}ccaaUfgAfuCfuguusu | 492 | AGGAAUUCCAAUGAUCUGUUU | 892 |
| CA914577 | cPrpusGfsusAfaAfagcagAfaCfcUfgAfgcsg | 493 | UGUAAAAGCAGAACCUGAGCG | 894 |
| CA914579 | cPrpusUfscsAfuCfagcuuUfuCfcAfgGfgusc | 494 | UUCAUCAGCUUUUCCAGGGUC | 895 |
| CA914581 | cPrpasGfsgsCfcUfucaucAfgCfuUfuUfccsa | 495 | AGGCCUUCAUCAGCUUUUCCA | 896 |
| CA914583 | cPrpusGfsasCfuCfgaaggCfcUfuCfaUfcasg | 496 | UGACUCGAAGGCCUUCAUCAG | 897 |
| CA914585 | cPrpusAfscsUfuGfagggaCfuCfgAfaGfgcsc | 497 | UACUUGAGGGACUCGAAGGCC | 898 |
| CA914587 | cPrpusGfsasCfuUfgagggAfcUfcGfaAfggsc | 498 | UGACUUGAGGGACUCGAAGGC | 899 |
| CA914589 | cPrpasGfsasAfaAfaguucCfaUfaGfcGfausg | 499 | AGAAAAAGUUCCAUAGCGAUG | 900 |
| CA914591 | cPrpasAfsgsAfuUfagaauCfcAfuCfaAfagsc | 500 | AAGAUUAGAAUCCAUCAAAGC | 901 |
| CA914593 | cPrpusUfsusGfgAfagauuAfgAfaUfcCfausc | 501 | UUUGGAAGAUUAGAAUCCAUC | 902 |
| CA914595 | cPrpusUfsgsUfcAfuuugcAfaAfaUfuGfccsa | 502 | UUGUCAUUUGCAAAAUUGCCA | 903 |
| CA914597 | cPrpusUfsgsUfgUfaugauGfuAfaCfgUfcasg | 503 | UUGUGUAUGAUGUAACGUCAG | 904 |
| CA914599 | cPrpasCfsasAfcAfuugugGfuCfuUfgGfugsc | 504 | ACAACAUUGUGGUCUUGGUGC | 905 |
| CA914601 | cPrpusCfsusAfuAfaguucCfaCfaAfuAfcusc | 505 | UCUAUAAGUUCCACAAUACUC | 906 |
| CA914603 | cPrpusCfsasUfgAfucgauGfuAfgUfuCfaasg | 506 | UCAUGAUCGAUGUAGUUCAAG | 907 |
| CA914605 | cPrpusAfscsAfaAfgcuucAfcAfgCfaUfccsa | 507 | UACAAAGCUUCACAGCAUCCA | 908 |
| CA914607 | cPrpusAfscsUfuGfuuguaAfcAfgGfaCfcusg | 508 | UACUUGUUGUAACAGGACCUG | 909 |
| CA914609 | cPrpusUfsgsAfuGfaggauUfuAfcUfuGfuusg | 509 | UUGAUGAGGAUUUACUUGUUG | 910 |
| CA914611 | cPrpasCfsasAfaCfaguugCfcAfuCfaUfugsg | 510 | ACAAACAGUUGCCAUCAUUGG | 911 |
| CA914613 | cPrpusAfscsAfaAfgccaaUfaAfaCfaCfcusg | 511 | UACAAAGCCAAUAAACACCUG | 912 |
| CA914615 | cPrpusAfsusCfuGfucgagAfcAfgUfcGfcusu | 512 | UAUCUGUCGAGACAGUCGCUU | 913 |
| CA914617 | cPrpusAfsgsUfuGfaacagUfgCfuCfaCfggsa | 513 | UAGUUGAACAGUGCUCACGGA | 914 |
| CA914619 | cPrpusAfscsUfaAfguaacUfuUfgUfgCfugsg | 514 | UACUAAGUAACUUUGUGCUGG | 915 |
| CA914621 | cPrpusCfsasCfaUfuccaaGfuUfuGfgCfugsc | 515 | UCACAUUCCAAGUUUGGCUGC | 916 |
| CA914623 | cPrpusGfsusAfcUfauuucUfcUfaUfuGfcasc | 516 | UGUACUAUUUCUCUAUUGCAC | 917 |
| CA914625 | cPrpusAfsgsUfcAfuggagGfuUfcUfgAfcasg | 517 | UAGUCAUGGAGGUUCUGACAG | 918 |
| CA914627 | cPrpusGfsasAfuGfugauuUfaCfaAfuGfagsc | 518 | UGAAUGUGAUUUACAAUGAGC | 919 |
| CA914629 | cPrpusAfscsUfgAfugaagUfcCfuGfuAfcusg | 519 | UACUGAUGAAGUCCUGUACUG | 920 |
| CA914631 | cPrpusAfscsAfaCfgagacUfgAfaUfuGfccsu | 520 | UACAACGAGACUGAAUUGCCU | 879 |
| CA914633 | cPrpusUfsgsAfgUfucuucCfaUfuGfgCfaasc | 521 | UUGAGUUCUUCCAUUGGCAAC | 921 |
| CA914635 | cPrpusAfscsUfaAfgugagUfcUfuGfcAfugsg | 522 | UACUAAGUGAGUCUUGCAUGG | 881 |
| CA914637 | cPrpusCfsasGfaAfauuucAfcUfcAfuCfccsu | 523 | UCAGAAAUUUCACUCAUCCCU | 922 |
| CA914639 | cPrpasGfsasUfcAfuucaaCfuUfgCfuCfcasg | 524 | AGAUCAUUCAACUUGCUCCAG | 880 |
| CA914972 | cPrpusCfsasUfcAfgcuuuUfcCfaGfgGfucsg | 525 | UCAUCAGCUUUUCCAGGGUCG | 923 |
| CA914974 | cPrpusAfscsUfcGfaaggcCfuUfcAfuCfagsc | 526 | UACUCGAAGGCCUUCAUCAGC | 924 |
| CA914976 | cPrpusUfsusUfcUfuugguCfgGfuGfcAfgcsg | 527 | UUUUCUUUGGUCGGUGCAGCG | 925 |
| CA914978 | cPrpusCfsusUfuCfuuuggUfcGfgUfgCfagsc | 528 | UCUUUCUUUGGUCGGUGCAGC | 926 |
| CA914980 | cPrpusUfscsUfuUfcuuugGfuCfgGfuGfcasg | 529 | UUCUUUCUUUGGUCGGUGCAG | 927 |
| CA915153 | cPrpusGfsascUfcgaaggCfcUfuCfaucasg | 530 | UGACUCGAAGGCCUUCAUCAG | 897 |
| CA915154 | cPrpusGfsascucGfaaggCfcUfuCfaucasg | 531 | UGACUCGAAGGCCUUCAUCAG | 897 |
| CA915155 | cPrpusGfsascucgaAfggCfcUfuCfaucasg | 532 | UGACUCGAAGGCCUUCAUCAG | 897 |
| CA915156 | cPrpusGfsacucGfaaggCfcUfuCfaucasg | 533 | UGACUCGAAGGCCUUCAUCAG | 897 |
| CA915160 | cPrpusGfsascucGfaaggccUfucaucasg | 534 | UGACUCGAAGGCCUUCAUCAG | 897 |
| CA915161 | cPrpusGfsascucgaAfggccUfucaucasg | 535 | UGACUCGAAGGCCUUCAUCAG | 897 |
| CA915162 | cPrpusGfsascucGfaaggccUfucaucAfsg | 536 | UGACUCGAAGGCCUUCAUCAG | 897 |
| CA915860 | cPrpusCfsasuGfaucgauGfuAfgUfucaasg | 537 | UCAUGAUCGAUGUAGUUCAAG | 907 |
| CA915861 | cPrpusCfsasugaUfcgauGfuAfgUfucaasg | 538 | UCAUGAUCGAUGUAGUUCAAG | 907 |
| CA915862 | cPrpusCfsaugaUfcgauGfuAfgUfucaasg | 539 | UCAUGAUCGAUGUAGUUCAAG | 907 |
| CA915863 | cPrpusCfsaugaUfcgauGfuAfgUfucaassg | 540 | UCAUGAUCGAUGUAGUUCAAG | 907 |
| CA915864 | cPrpussCfsaugaUfcgauGfuAfgUfucaassg | 541 | UCAUGAUCGAUGUAGUUCAAG | 907 |
| CA915868 | cPrpusCfsaugaUfcgauguAfguucaAfsg | 542 | UCAUGAUCGAUGUAGUUCAAG | 907 |
| CA915869 | cPrpusdCsaugadTcgaudGuAfgdUucaasg | 543 | UCAUGATCGAUGUAGUUCAAG | 928 |
| CA915870 | cPrpusCfsaugadTcgaudGuAfgdUucaasg | 544 | UCAUGATCGAUGUAGUUCAAG | 928 |
| CA915871 | cPrpusCfsaugadTcgauGfuAfgdUucaasg | 545 | UCAUGATCGAUGUAGUUCAAG | 928 |
| CA915872 | cPrpusUfsgsuguAfugauGfuAfaCfgucasg | 546 | UUGUGUAUGAUGUAACGUCAG | 904 |
| CA915873 | cPrpusUfsgsuGfuaugauGfuAfaCfgucasg | 547 | UUGUGUAUGAUGUAACGUCAG | 904 |
| CA915874 | cPrpusUfsguguAfugauGfuAfaCfgucasg | 548 | UUGUGUAUGAUGUAACGUCAG | 904 |
| CA915875 | cPrpusUfsguguAfugauGfuAfaCfgucassg | 549 | UUGUGUAUGAUGUAACGUCAG | 904 |
| CA915876 | cPrpussUfsguguAfugauGfuAfaCfgucassg | 550 | UUGUGUAUGAUGUAACGUCAG | 904 |
| CA915880 | cPrpusUfsguguAfugauguAfacgucAfsg | 551 | UUGUGUAUGAUGUAACGUCAG | 904 |
| CA915881 | cPrpusdTsgugudAugaudGuAfadCgucasg | 552 | UTGUGUAUGAUGUAACGUCAG | 929 |
| CA915882 | cPrpusUfsgugudAugaudGuAfadCgucasg | 553 | UUGUGUAUGAUGUAACGUCAG | 904 |
| CA915883 | cPrpusUfsgugudAugauGfuAfadCgucasg | 554 | UUGUGUAUGAUGUAACGUCAG | 904 |
| CA915884 | cPrpusAfscsaAfagccaaUfaAfaCfaccusg | 555 | UACAAAGCCAAUAAACACCUG | 912 |
| CA915885 | cPrpusAfscsaaaGfccaaUfaAfaCfaccusg | 556 | UACAAAGCCAAUAAACACCUG | 912 |
| CA915886 | cPrpusAfscaaaGfccaaUfaAfaCfaccusg | 557 | UACAAAGCCAAUAAACACCUG | 912 |
| CA915887 | cPrpusAfscaaaGfccaaUfaAfaCfaccussg | 558 | UACAAAGCCAAUAAACACCUG | 912 |
| CA915888 | cPrpussAfscaaaGfccaaUfaAfaCfaccussg | 559 | UACAAAGCCAAUAAACACCUG | 912 |
| CA915892 | cPrpusAfscaaaGfccaauaAfacaccUfsg | 560 | UACAAAGCCAAUAAACACCUG | 912 |
| CA915893 | cPrpusdAscaaadGccaadTaAfadCaccusg | 561 | UACAAAGCCAATAAACACCUG | 930 |
| CA915894 | cPrpusAfscaaadGccaadTaAfadCaccusg | 562 | UACAAAGCCAATAAACACCUG | 930 |
| CA915895 | cPrpusAfscaaadGccaaUfaAfadCaccusg | 563 | UACAAAGCCAAUAAACACCUG | 912 |

I = hypoxanthine (inosine) nucleotide

TABLE 4
HTT Agent Sense Strand Sequences (Shown Without Linkers,
Conjugates, or Capping Moieties)

| | | | Underlying Base Sequence | |
|---|---|---|---|---|
| | | SEQ | (5′ → 3′) | SEQ |
| | Modified Sense Strand | ID | (Shown as an Unmodified | ID |
| Strand ID | (5′ → 3′) | NO. | Nucleotide Sequence) | NO. |
| CS005389-NL | cugacguuAfCfAfucauacacaa | 564 | CUGACGUUACAUCAUACACAA | 931 |
| CS005390-NL | cuugaacuAfCfAfucgaucauga | 565 | CUUGAACUACAUCGAUCAUGA | 932 |
| CS005391-NL | cagguguuUfAfUfuggcuuugua | 566 | CAGGUGUUUAUUGGCUUUGUA | 933 |
| CS005392-NL | cugacguuAfCfAfucauacacaa | 567 | CUGACGUUACAUCAUACACAA | 931 |
| CS005393-NL | cuugaacuAfCfAfucgaucauga | 568 | CUUGAACUACAUCGAUCAUGA | 932 |
| CS005394-NL | cagguguuUfAfUfuggcuuugua | 569 | CAGGUGUUUAUUGGCUUUGUA | 933 |
| CS005534-NL | aggcaauuCfAfGfucucguugua | 570 | AGGCAAUUCAGUCUCGUUGUA | 934 |
| CS005535-NL | aggcaauuCfAfGfucucguugua | 571 | AGGCAAUUCAGUCUCGUUGUA | 934 |
| CS005558-NL | cugacguuAfCfAfucauacacaa | 572 | CUGACGUUACAUCAUACACAA | 931 |
| CS005559-NL | cuugaacuAfCfAfucgaucauga | 573 | CUUGAACUACAUCGAUCAUGA | 932 |
| CS005560-NL | cagguguuUfAfUfuggcuuugua | 574 | CAGGUGUUUAUUGGCUUUGUA | 933 |
| CS005561-NL | aggcaauuCfAfGfucucguugua | 575 | AGGCAAUUCAGUCUCGUUGUA | 934 |
| CS006560-NL | cugaugaaGfGfCfuuucgaguca | 577 | CUGAUGAAGGCUUUCGAGUCA | 936 |
| CS006700-NL | cuggagcaAfGfUfugaaugauca | 578 | CUGGAGCAAGUUGAAUGAUCA | 937 |
| CS006703-NL | cuggagcaAfgUfugaaugaucu | 579 | CUGGAGCAAGUUGAAUGAUCU | 938 |
| CS006704-NL | cuggagcaAfgUfUfgaaugaucu | 580 | CUGGAGCAAGUUGAAUGAUCU | 938 |
| CS006705-NL | cuggagcaAfgUfuGfaaugaucu | 581 | CUGGAGCAAGUUGAAUGAUCU | 938 |
| CS006708-NL | cuggagcaAfGfUfugaaugauuu | 582 | CUGGAGCAAGUUGAAUGAUUU | 939 |
| CS006712-NL | aggcaauuCfaGfucucguugua | 583 | AGGCAAUUCAGUCUCGUUGUA | 934 |
| CS006713-NL | aggcaauuCfaGfUfcucguugua | 584 | AGGCAAUUCAGUCUCGUUGUA | 934 |
| CS006714-NL | aggcaauuCfaGfuCfucguugua | 585 | AGGCAAUUCAGUCUCGUUGUA | 934 |
| CS006717-NL | aggcaauuCfAfGfucuuguugua | 586 | AGGCAAUUCAGUCUUGUUGUA | 940 |
| CS006719-NL | agguaauuCfAfGfucucguugua | 587 | AGGUAAUUCAGUCUCGUUGUA | 941 |
| CS006720-NL | aggcaauuCfAfGfuuucguugua | 588 | AGGCAAUUCAGUUUCGUUGUA | 942 |
| CS006723-NL | ccaugcaaGfaCfucacuuagua | 589 | CCAUGCAAGACUCACUUAGUA | 943 |
| CS006724-NL | ccaugcaaGfaCfUfcacuuagua | 590 | CCAUGCAAGACUCACUUAGUA | 943 |
| CS006725-NL | ccaugcaaGfaCfuCfacuuagua | 591 | CCAUGCAAGACUCACUUAGUA | 943 |
| CS006728-NL | ccauguaaGfAfCfucacuuagua | 592 | CCAUGUAAGACUCACUUAGUA | 944 |
| CS006730-NL | ccaugcaaGfAfCfucauuuagua | 593 | CCAUGCAAGACUCAUUUAGUA | 945 |
| CS006732-NL | ccaugcaaGfAfCfuuacuuagua | 594 | CCAUGCAAGACUUACUUAGUA | 946 |
| CS007251-NL | cugaugaaGfGfCfcuucgaguca | 595 | CUGAUGAAGGCCUUCGAGUCA | 947 |
| CS007252-NL | ccagcacaAfAfGfuuacuuagua | 596 | CCAGCACAAAGUUACUUAGUA | 948 |
| CS007253-NL | caguacagGfAfCfuucaucagua | 597 | CAGUACAGGACUUCAUCAGUA | 949 |
| CS007254-NL | ccaugcaaGfAfCfucacuuagua | 598 | CCAUGCAAGACUCACUUAGUA | 943 |
| CS007255-NL | cuggagcaAfGfUfugaaugaucu | 599 | CUGGAGCAAGUUGAAUGAUCU | 938 |
| CS007256-NL | cugaugaaGfGfCfcuucgaguca | 600 | CUGAUGAAGGCCUUCGAGUCA | 947 |
| CS007257-NL | ccagcacaAfAfGfuuacuuagua | 601 | CCAGCACAAAGUUACUUAGUA | 948 |
| CS007258-NL | caguacagGfAfCfuucaucagua | 602 | CAGUACAGGACUUCAUCAGUA | 949 |
| CS007259-NL | ccaugcaaGfAfCfucacuuagua | 603 | CCAUGCAAGACUCACUUAGUA | 943 |
| CS007260-NL | cuggagcaAfGfUfugaaugaucu | 604 | CUGGAGCAAGUUGAAUGAUCU | 938 |
| CS008020-NL | cuggagcaAfgUfuGfaaugauca | 605 | CUGGAGCAAGUUGAAUGAUCA | 937 |
| CS008022-NL | cuggagcaAfgUfuGfaaugauua | 606 | CUGGAGCAAGUUGAAUGAUUA | 950 |
| CS008023-NL | agguaauuCfaGfuCfucguugua | 607 | AGGUAAUUCAGUCUCGUUGUA | 941 |
| CS008137-NL | ccaugcaaGfaCfUfuacuuagua | 608 | CCAUGCAAGACUUACUUAGUA | 946 |
| CS009038-NL | aggcaauuCfaGfuCfucguugua | 609 | AGGCAAUUCAGUCUCGUUGUA | 934 |
| CS009039-NL | cuggagcaAfgUfuGfaaugauca | 610 | CUGGAGCAAGUUGAAUGAUCA | 937 |
| CS009183-NL | ccaugcaaGfaCfUfcacuuagua | 611 | CCAUGCAAGACUCACUUAGUA | 943 |
| CS009303-NL | aggcaauuCfAfGfucucguugua | 612 | AGGCAAUUCAGUCUCGUUGUA | 934 |
| CS009304-NL | cuggagcaAfGfUfugaaugaucu | 613 | CUGGAGCAAGUUGAAUGAUCU | 938 |
| CS009305-NL | aggcaauuCfaGfuCfucguugua | 614 | AGGCAAUUCAGUCUCGUUGUA | 934 |
| CS009306-NL | cuggagcaAfgUfuGfaaugauca | 615 | CUGGAGCAAGUUGAAUGAUCA | 937 |
| CS009307-NL | aggcaauuCfaGfuCfucguugua | 616 | AGGCAAUUCAGUCUCGUUGUA | 934 |
| CS009417-NL | ccaugcaaGfaCfUfcacuuagua | 617 | CCAUGCAAGACUCACUUAGUA | 943 |
| CS009418-NL | cuggagcaAfgUfuGfaaugauca | 618 | CUGGAGCAAGUUGAAUGAUCA | 937 |
| CS009419-NL | aggcaauuCfAfGfucucguugua | 619 | AGGCAAUUCAGUCUCGUUGUA | 934 |
| CS009420-NL | cuggagcaAfGfUfugaaugaucu | 620 | CUGGAGCAAGUUGAAUGAUCU | 938 |
| CS011230-NL | aggcaauuCfAfGfucucguugua | 621 | AGGCAAUUCAGUCUCGUUGUA | 934 |
| CS913031-NL | aaacagauCfAfUfuggaauuccu | 622 | AAACAGAUCAUUGGAAUUCCU | 951 |
| CS913032-NL | ugugauuaUfGfUfcugucagaaa | 623 | UGUGAUUAUGUCUGUCAGAAA | 952 |
| CS914492-NL | ugugauuaUfGfUfcugucagaaa | 624 | UGUGAUUAUGUCUGUCAGAAA | 952 |
| CS914493-NL | aaacagauCfAfUfuggaauuccu | 625 | AAACAGAUCAUUGGAAUUCCU | 951 |
| CS914576-NL | cgcucaggUfUfCfugcuuuuaca | 626 | CGCUCAGGUUCUGCUUUUACA | 953 |
| CS914578-NL | gacccuggAfAfAfagcugaugaa | 627 | GACCCUGGAAAAGCUGAUGAA | 954 |
| CS914580-NL | uggaaaagCfUfGfaugaaggccu | 628 | UGGAAAAGCUGAUGAAGGCCU | 955 |
| CS914582-NL | cugaugaaGfGfCfcuucgaguca | 629 | CUGAUGAAGGCCUUCGAGUCA | 947 |
| CS914584-NL | ggccuucgAfGfUfcccucaagua | 630 | GGCCUUCGAGUCCCUCAAGUA | 956 |
| CS914586-NL | gccuucgaGfUfCfccucaaguca | 631 | GCCUUCGAGUCCCUCAAGUCA | 957 |
| CS914588-NL | caucgcuaUfGfGfaacuuuuucu | 632 | CAUCGCUAUGGAACUUUUUCU | 958 |
| CS914590-NL | gcuuugauGfGfAfuucuaaucuu | 633 | GCUUUGAUGGAUUCUAAUCUU | 959 |
| CS914592-NL | gauggauuCfUfAfaucuuccaaa | 634 | GAUGGAUUCUAAUCUUCCAAA | 960 |
| CS914594-NL | uggcaauuUfUfGfcaaaugacaa | 635 | UGGCAAUUUUGCAAAUGACAA | 961 |
| CS914596-NL | cugacguuAfCfAfucauacacaa | 636 | CUGACGUUACAUCAUACACAA | 931 |
| CS914598-NL | gcaccaagAfCfCfacaauguugu | 637 | GCACCAAGACCACAAUGUUGU | 962 |
| CS914600-NL | gaguauugUfGfGfaacuuauaga | 638 | GAGUAUUGUGGAACUUAUAGA | 963 |
| CS914602-NL | cuugaacuAfCfAfucgaucauga | 639 | CUUGAACUACAUCGAUCAUGA | 932 |
| CS914604-NL | uggaugcuGfUfGfaagcuuugua | 640 | UGGAUGCUGUGAAGCUUUGUA | 964 |
| CS914606-NL | cagguccuGfUfUfacaacaagua | 641 | CAGGUCCUGUUACAACAAGUA | 965 |
| CS914608-NL | caacaaguAfAfAfuccucaucaa | 642 | CAACAAGUAAAUCCUCAUCAA | 966 |
| CS914610-NL | ccaaugauGfGfCfaacuguuugu | 643 | CCAAUGAUGGCAACUGUUUGU | 967 |
| CS914612-NL | cagguguuUfAfUfuggcuuugua | 644 | CAGGUGUUUAUUGGCUUUGUA | 933 |
| CS914614-NL | aagcgacuGfUfCfucgacagaua | 645 | AAGCGACUGUCUCGACAGAUA | 968 |
| CS914616-NL | uccgugagCfAfCfuguucaacua | 646 | UCCGUGAGCACUGUUCAACUA | 969 |
| CS914618-NL | ccagcacaAfAfGfuuacuuagua | 647 | CCAGCACAAAGUUACUUAGUA | 948 |
| CS914620-NL | gcagccaaAfCfUfuggaauguga | 648 | GCAGCCAAACUUGGAAUGUGA | 970 |
| CS914622-NL | gugcaauaGfAfGfaaauaguaca | 649 | GUGCAAUAGAGAAAUAGUACA | 971 |
| CS914624-NL | cugucagaAfCfCfuccaugacua | 650 | CUGUCAGAACCUCCAUGACUA | 972 |
| CS914626-NL | gcucauugUfAfAfaucacauuca | 651 | GCUCAUUGUAAAUCACAUUCA | 973 |
| CS914628-NL | caguacagGfAfCfuucaucagua | 652 | CAGUACAGGACUUCAUCAGUA | 949 |
| CS914630-NL | aggcaauuCfAfGfucucguugua | 653 | AGGCAAUUCAGUCUCGUUGUA | 934 |
| CS914632-NL | guugccaaUfGfGfaagaacucaa | 654 | GUUGCCAAUGGAAGAACUCAA | 974 |
| CS914634-NL | ccaugcaaGfAfCfucacuuagua | 655 | CCAUGCAAGACUCACUUAGUA | 943 |
| CS914636-NL | agggaugaGfUfGfaaauuucuga | 656 | AGGGAUGAGUGAAAUUUCUGA | 975 |
| CS914638-NL | cuggagcaAfGfUfugaaugaucu | 657 | CUGGAGCAAGUUGAAUGAUCU | 938 |
| CS914971-NL | cgacccugGfAfAfaagcuiauga | 658 | CGACCCUGGAAAAGCUIAUGA | 976 |
| CS914973-NL | gcugaugaAfGfGfccuuciagua | 659 | GCUGAUGAAGGCCUUCIAGUA | 977 |
| CS914975-NL | cgcugcacCfGfAfccaaagaaaa | 660 | CGCUGCACCGACCAAAGAAAA | 978 |
| CS914977-NL | gcugcaccGfAfCfcaaagaaaga | 661 | GCUGCACCGACCAAAGAAAGA | 979 |
| CS914979-NL | cugcaccgAfCfCfaaagaaagaa | 662 | CUGCACCGACCAAAGAAAGAA | 980 |
| CS915157-NL | cugaugaaGfgCfcuucgaguca | 663 | CUGAUGAAGGCCUUCGAGUCA | 947 |
| CS915158-NL | cugaugAfaGfgCfcuucgaguca | 664 | CUGAUGAAGGCCUUCGAGUCA | 947 |
| CS915159-NL | cugaugaaGfgCfCfuucgaguca | 665 | CUGAUGAAGGCCUUCGAGUCA | 947 |
| CS915865-NL | cuugaacuAfcAfucgaucauga | 666 | CUUGAACUACAUCGAUCAUGA | 932 |
| CS915866-NL | cuugaaCfuAfcAfucgaucauga | 667 | CUUGAACUACAUCGAUCAUGA | 932 |
| CS915867-NL | cuugaacuAfcAfUfcgaucauga | 668 | CUUGAACUACAUCGAUCAUGA | 932 |
| CS915877-NL | cugacguuAfcAfucauacacaa | 669 | CUGACGUUACAUCAUACACAA | 931 |
| CS915878-NL | cugacgUfuAfcAfucauacacaa | 670 | CUGACGUUACAUCAUACACAA | 931 |
| CS915879-NL | cugacguuAfcAfUfcauacacaa | 671 | CUGACGUUACAUCAUACACAA | 931 |
| CS915889-NL | cagguguuUfaUfuggcuuugua | 672 | CAGGUGUUUAUUGGCUUUGUA | 933 |
| CS915890-NL | caggugUfuUfaUfuggcuuugua | 673 | CAGGUGUUUAUUGGCUUUGUA | 933 |
| CS915891-NL | cagguguuUfaUfUfggcuuugua | 674 | CAGGUGUUUAUUGGCUUUGUA | 933 |

I = hypoxanthine (inosine) nucleotide

TABLE 5
HTT Agent Sense Strand Sequences (Shown without antigen binding protein
conjugate and with terminal caps (see Table 10 for structure information.))

| | | | Underlying Base Sequence | |
|---|---|---|---|---|
| | | SEQ | (5′ → 3′) | SEQ |
| | | ID | (Shown as an Unmodified | ID |
| Strand ID | Modified Sense Strand (5′ → 3′) | NO. | Nucleotide Sequence) | NO. |
| CS005389-C | NH2-C6s(invAb)scugacguuAfCfAfucauacacaas | 675 | CUGACGUUACAUCAUACACAA | 931 |
| | (invAb) | | | |
| CS005390-C | NH2-C6s(invAb)scuugaacuAfCfAfucgaucaugas | 676 | CUUGAACUACAUCGAUCAUGA | 932 |
| | (invAb) | | | |
| CS005391-C | NH2-C6s(invAb)scagguguuUfAfUfuggcuuuguas | 677 | CAGGUGUUUAUUGGCUUUGUA | 933 |
| | (invAb) | | | |
| CS005392-C | NH2-C6s(invAb)scugacguuAfCfAfucauacacaas | 678 | CUGACGUUACAUCAUACACAA | 931 |
| | (invAb) | | | |
| CS005393-C | NH2-C6s(invAb)scuugaacuAfCfAfucgaucaugas | 679 | CUUGAACUACAUCGAUCAUGA | 932 |
| | (invAb) | | | |
| CS005394-C | NH2-C6s(invAb)scagguguuUfAfUfuggcuuuguas | 680 | CAGGUGUUUAUUGGCUUUGUA | 933 |
| | (invAb) | | | |
| CS005534-C | NH2-C6s(invAb)saggcaauuCfAfGfucucguuguas | 681 | AGGCAAUUCAGUCUCGUUGUA | 934 |
| | (invAb) | | | |
| CS005535-C | NH2-C6s(invAb)saggcaauuCfAfGfucucguuguas | 682 | AGGCAAUUCAGUCUCGUUGUA | 934 |
| | (invAb) | | | |
| CS005558-C | (invAb)scugacguuAfCfAfucauacacaas(invAb) | 683 | CUGACGUUACAUCAUACACAA | 931 |
| CS005559-C | (invAb)scuugaacuAfCfAfucgaucaugas(invAb) | 684 | CUUGAACUACAUCGAUCAUGA | 932 |
| CS005560-C | (invAb)scagguguuUfAfUfuggcuuuguas(invAb) | 685 | CAGGUGUUUAUUGGCUUUGUA | 933 |
| CS005561-C | (invAb)saggcaauuCfAfGfucucguuguas(invAb) | 686 | AGGCAAUUCAGUCUCGUUGUA | 934 |
| CS006560-C | (invAb)scugaugaaGfGfCfuuucgagucas(invAb) | 688 | CUGAUGAAGGCUUUCGAGUCA | 936 |
| CS006700-C | (invAb)scuggagcaAfGfUfugaaugaucas(invAb) | 689 | CUGGAGCAAGUUGAAUGAUCA | 937 |
| CS006703-C | (invAb)scuggagcaAfgUfugaaugaucus(invAb) | 690 | CUGGAGCAAGUUGAAUGAUCU | 938 |
| CS006704-C | (invAb)scuggagcaAfgUfUfgaaugaucus(invAb) | 691 | CUGGAGCAAGUUGAAUGAUCU | 938 |
| CS006705-C | (invAb)scuggagcaAfgUfuGfaaugaucus(invAb) | 692 | CUGGAGCAAGUUGAAUGAUCU | 938 |
| CS006708-C | (invAb)scuggagcaAfGfUfugaaugauuus(invAb) | 693 | CUGGAGCAAGUUGAAUGAUUU | 939 |
| CS006712-C | (invAb)saggcaauuCfaGfucucguuguas(invAb) | 694 | AGGCAAUUCAGUCUCGUUGUA | 934 |
| CS006713-C | (invAb)saggcaauuCfaGfUfcucguuguas(invAb) | 695 | AGGCAAUUCAGUCUCGUUGUA | 934 |
| CS006714-C | (invAb)saggcaauuCfaGfuCfucguuguas(invAb) | 696 | AGGCAAUUCAGUCUCGUUGUA | 934 |
| CS006717-C | (invAb)saggcaauuCfAfGfucuuguuguas(invAb) | 697 | AGGCAAUUCAGUCUUGUUGUA | 940 |
| CS006719-C | (invAb)sagguaauuCfAfGfucucguuguas(invAb) | 698 | AGGUAAUUCAGUCUCGUUGUA | 941 |
| CS006720-C | (invAb)saggcaauuCfAfGfuuucguuguas(invAb) | 699 | AGGCAAUUCAGUUUCGUUGUA | 942 |
| CS006723-C | (invAb)sccaugcaaGfaCfucacuuaguas(invAb) | 700 | CCAUGCAAGACUCACUUAGUA | 943 |
| CS006724-C | (invAb)sccaugcaaGfaCfUfcacuuaguas(invAb) | 701 | CCAUGCAAGACUCACUUAGUA | 943 |
| CS006725-C | (invAb)sccaugcaaGfaCfuCfacuuaguas(invAb) | 702 | CCAUGCAAGACUCACUUAGUA | 943 |
| CS006728-C | (invAb)sccauguaaGfAfCfucacuuaguas(invAb) | 703 | CCAUGUAAGACUCACUUAGUA | 944 |
| CS006730-C | (invAb)sccaugcaaGfAfCfucauuuaguas(invAb) | 704 | CCAUGCAAGACUCAUUUAGUA | 945 |
| CS006732-C | (invAb)sccaugcaaGfAfCfuuacuuaguas(invAb) | 705 | CCAUGCAAGACUUACUUAGUA | 946 |
| CS007251-C | NH2-C6s(invAb)scugaugaaGfGfCfcuucgagucas | 706 | CUGAUGAAGGCCUUCGAGUCA | 947 |
| | (invAb) | | | |
| CS007252-C | NH2-C6s(invAb)sccagcacaAfAfGfuuacuuaguas | 707 | CCAGCACAAAGUUACUUAGUA | 948 |
| | (invAb) | | | |
| CS007253-C | NH2-C6s(invAb)scaguacagGfAfCfuucaucaguas | 708 | CAGUACAGGACUUCAUCAGUA | 949 |
| | (invAb) | | | |
| CS007254-C | NH2-C6s(invAb)sccaugcaaGfAfCfucacuuaguas | 709 | CCAUGCAAGACUCACUUAGUA | 943 |
| | (invAb) | | | |
| CS007255-C | NH2-C6s(invAb)scuggagcaAfGfUfugaaugaucus | 710 | CUGGAGCAAGUUGAAUGAUCU | 938 |
| | (invAb) | | | |
| CS007256-C | (invAb)scugaugaaGfGfCfcuucgagucas(invAb) | 711 | CUGAUGAAGGCCUUCGAGUCA | 947 |
| CS007257-C | (invAb)sccagcacaAfAfGfuuacuuaguas(invAb) | 712 | CCAGCACAAAGUUACUUAGUA | 948 |
| CS007258-C | (invAb)scaguacagGfAfCfuucaucaguas(invAb) | 713 | CAGUACAGGACUUCAUCAGUA | 949 |
| CS007259-C | (invAb)sccaugcaaGfAfCfucacuuaguas(invAb) | 714 | CCAUGCAAGACUCACUUAGUA | 943 |
| CS007260-C | (invAb)scuggagcaAfGfUfugaaugaucus(invAb) | 715 | CUGGAGCAAGUUGAAUGAUCU | 938 |
| CS008020-C | (invAb)scuggagcaAfgUfuGfaaugaucas(invAb) | 716 | CUGGAGCAAGUUGAAUGAUCA | 937 |
| CS008022-C | (invAb)scuggagcaAfgUfuGfaaugauuas(invAb) | 717 | CUGGAGCAAGUUGAAUGAUUA | 950 |
| CS008023-C | (invAb)sagguaauuCfaGfuCfucguuguas(invAb) | 718 | AGGUAAUUCAGUCUCGUUGUA | 941 |
| CS008137-C | (invAb)sccaugcaaGfaCfUfuacuuaguas(invAb) | 719 | CCAUGCAAGACUUACUUAGUA | 946 |
| CS009038-C | NH2-C6s(invAb)saggcaauuCfaGfuCfucguuguas | 720 | AGGCAAUUCAGUCUCGUUGUA | 934 |
| | (invAb) | | | |
| CS009039-C | NH2-C6s(invAb)scuggagcaAfgUfuGfaaugaucas | 721 | CUGGAGCAAGUUGAAUGAUCA | 937 |
| | (invAb) | | | |
| CS009183-C | NH2-C6s(invAb)sccaugcaaGfaCfUfcacuuaguas | 722 | CCAUGCAAGACUCACUUAGUA | 943 |
| | (invAb) | | | |
| CS009303-C | (invAb)saggcaauuCfAfGfucucguuguas(invAb) | 723 | AGGCAAUUCAGUCUCGUUGUA | 934 |
| CS009304-C | (invAb)scuggagcaAfGfUfugaaugaucus(invAb) | 724 | CUGGAGCAAGUUGAAUGAUCU | 938 |
| CS009305-C | (invAb)saggcaauuCfaGfuCfucguuguas(invAb) | 725 | AGGCAAUUCAGUCUCGUUGUA | 934 |
| CS009306-C | (invAb)scuggagcaAfgUfuGfaaugaucas(invAb) | 726 | CUGGAGCAAGUUGAAUGAUCA | 937 |
| CS009307-C | (invAb)saggcaauuCfaGfuCfucguuguas(invAb) | 727 | AGGCAAUUCAGUCUCGUUGUA | 934 |
| CS009417-C | (invAb)sccaugcaaGfaCfUfcacuuaguas(invAb) | 728 | CCAUGCAAGACUCACUUAGUA | 943 |
| CS009418-C | (invAb)scuggagcaAfgUfuGfaaugaucas(invAb) | 729 | CUGGAGCAAGUUGAAUGAUCA | 937 |
| CS009419-C | (invAb)saggcaauuCfAfGfucucguuguas(invAb) | 730 | AGGCAAUUCAGUCUCGUUGUA | 934 |
| CS009420-C | (invAb)scuggagcaAfGfUfugaaugaucus(invAb) | 731 | CUGGAGCAAGUUGAAUGAUCU | 938 |
| CS913031-C | (invAb)saaacagauCfAfUfuggaauuccus(invAb) | 733 | AAACAGAUCAUUGGAAUUCCU | 951 |
| CS913032-C | (invAb)sugugauuaUfGfUfcugucagaaas(invAb) | 734 | UGUGAUUAUGUCUGUCAGAAA | 952 |
| CS914492-C | (invAb)sugugauuaUfGfUfcugucagaaas(invAb) | 735 | UGUGAUUAUGUCUGUCAGAAA | 952 |
| CS914493-C | (invAb)saaacagauCfAfUfuggaauuccus(invAb) | 736 | AAACAGAUCAUUGGAAUUCCU | 951 |
| CS914576-C | (invAb)scgcucaggUfUfCfugcuuuuacas(invAb) | 737 | CGCUCAGGUUCUGCUUUUACA | 953 |
| CS914578-C | (invAb)sgacccuggAfAfAfagcugaugaas(invAb) | 738 | GACCCUGGAAAAGCUGAUGAA | 954 |
| CS914580-C | (invAb)suggaaaagCfUfGfaugaaggccus(invAb) | 739 | UGGAAAAGCUGAUGAAGGCCU | 955 |
| CS914582-C | (invAb)scugaugaaGfGfCfcuucgagucas(invAb) | 740 | CUGAUGAAGGCCUUCGAGUCA | 947 |
| CS914584-C | (invAb)sggccuucgAfGfUfcccucaaguas(invAb) | 741 | GGCCUUCGAGUCCCUCAAGUA | 956 |
| CS914586-C | (invAb)sgccuucgaGfUfCfccucaagucas(invAb) | 742 | GCCUUCGAGUCCCUCAAGUCA | 957 |
| CS914588-C | (invAb)scaucgcuaUfGfGfaacuuuuucus(invAb) | 743 | CAUCGCUAUGGAACUUUUUCU | 958 |
| CS914590-C | (invAb)sgcuuugauGfGfAfuucuaaucuus(invAb) | 744 | GCUUUGAUGGAUUCUAAUCUU | 959 |
| CS914592-C | (invAb)sgauggauuCfUfAfaucuuccaaas(invAb) | 745 | GAUGGAUUCUAAUCUUCCAAA | 960 |
| CS914594-C | (invAb)suggcaauuUfUfGfcaaaugacaas(invAb) | 746 | UGGCAAUUUUGCAAAUGACAA | 961 |
| CS914596-C | (invAb)scugacguuAfCfAfucauacacaas(invAb) | 747 | CUGACGUUACAUCAUACACAA | 931 |
| CS914598-C | (invAb)sgcaccaagAfCfCfacaauguugus(invAb) | 748 | GCACCAAGACCACAAUGUUGU | 962 |
| CS914600-C | (invAb)sgaguauugUfGfGfaacuuauagas(invAb) | 749 | GAGUAUUGUGGAACUUAUAGA | 963 |
| CS914602-C | (invAb)scuugaacuAfCfAfucgaucaugas(invAb) | 750 | CUUGAACUACAUCGAUCAUGA | 932 |
| CS914604-C | (invAb)suggaugcuGfUfGfaagcuuuguas(invAb) | 751 | UGGAUGCUGUGAAGCUUUGUA | 964 |
| CS914606-C | (invAb)scagguccuGfUfUfacaacaaguas(invAb) | 752 | CAGGUCCUGUUACAACAAGUA | 965 |
| CS914608-C | (invAb)scaacaaguAfAfAfuccucaucaas(invAb) | 753 | CAACAAGUAAAUCCUCAUCAA | 966 |
| CS914610-C | (invAb)sccaaugauGfGfCfaacuguuugus(invAb) | 754 | CCAAUGAUGGCAACUGUUUGU | 967 |
| CS914612-C | (invAb)scagguguuUfAfUfuggcuuuguas(invAb) | 755 | CAGGUGUUUAUUGGCUUUGUA | 933 |
| CS914614-C | (invAb)saagcgacuGfUfCfucgacagauas(invAb) | 756 | AAGCGACUGUCUCGACAGAUA | 968 |
| CS914616-C | (invAb)succgugagCfAfCfuguucaacuas(invAb) | 757 | UCCGUGAGCACUGUUCAACUA | 969 |
| CS914618-C | (invAb)sccagcacaAfAfGfuuacuuaguas(invAb) | 758 | CCAGCACAAAGUUACUUAGUA | 948 |
| CS914620-C | (invAb)sgcagccaaAfCfUfuggaaugugas(invAb) | 759 | GCAGCCAAACUUGGAAUGUGA | 970 |
| CS914622-C | (invAb)sgugcaauaGfAfGfaaauaguacas(invAb) | 760 | GUGCAAUAGAGAAAUAGUACA | 971 |
| CS914624-C | (invAb)scugucagaAfCfCfuccaugacuas(invAb) | 761 | CUGUCAGAACCUCCAUGACUA | 972 |
| CS914626-C | (invAb)sgcucauugUfAfAfaucacauucas(invAb) | 762 | GCUCAUUGUAAAUCACAUUCA | 973 |
| CS914628-C | (invAb)scaguacagGfAfCfuucaucaguas(invAb) | 763 | CAGUACAGGACUUCAUCAGUA | 949 |
| CS914630-C | (invAb)saggcaauuCfAfGfucucguuguas(invAb) | 764 | AGGCAAUUCAGUCUCGUUGUA | 934 |
| CS914632-C | (invAb)sguugccaaUfGfGfaagaacucaas(invAb) | 765 | GUUGCCAAUGGAAGAACUCAA | 974 |
| CS914634-C | (invAb)sccaugcaaGfAfCfucacuuaguas(invAb) | 766 | CCAUGCAAGACUCACUUAGUA | 943 |
| CS914636-C | (invAb)sagggaugaGfUfGfaaauuucugas(invAb) | 767 | AGGGAUGAGUGAAAUUUCUGA | 975 |
| CS914638-C | (invAb)scuggagcaAfGfUfugaaugaucus(invAb) | 768 | CUGGAGCAAGUUGAAUGAUCU | 938 |
| CS914971-C | (invAb)scgacccugGfAfAfaagcuiaugas(invAb) | 769 | CGACCCUGGAAAAGCUIAUGA | 976 |
| CS914973-C | (invAb)sgcugaugaAfGfGfccuuciaguas(invAb) | 770 | GCUGAUGAAGGCCUUCIAGUA | 977 |
| CS914975-C | (invAb)scgcugcacCfGfAfccaaagaaaas(invAb) | 771 | CGCUGCACCGACCAAAGAAAA | 978 |
| CS914977-C | (invAb)sgcugcaccGfAfCfcaaagaaagas(invAb) | 772 | GCUGCACCGACCAAAGAAAGA | 979 |
| CS914979-C | (invAb)scugcaccgAfCfCfaaagaaagaas(invAb) | 773 | CUGCACCGACCAAAGAAAGAA | 980 |
| CS915157-C | (invAb)scugaugaaGfgCfcuucgagucas(invAb) | 774 | CUGAUGAAGGCCUUCGAGUCA | 947 |
| CS915158-C | (invAb)scugaugAfaGfgCfcuucgagucas(invAb) | 775 | CUGAUGAAGGCCUUCGAGUCA | 947 |
| CS915159-C | (invAb)scugaugaaGfgCfCfuucgagucas(invAb) | 776 | CUGAUGAAGGCCUUCGAGUCA | 947 |
| CS915865-C | (invAb)scuugaacuAfcAfucgaucaugas(invAb) | 777 | CUUGAACUACAUCGAUCAUGA | 932 |
| CS915866-C | (invAb)scuugaaCfuAfcAfucgaucaugas(invAb) | 778 | CUUGAACUACAUCGAUCAUGA | 932 |
| CS915867-C | (invAb)scuugaacuAfcAfUfcgaucaugas(invAb) | 779 | CUUGAACUACAUCGAUCAUGA | 932 |
| CS915877-C | (invAb)scugacguuAfcAfucauacacaas(invAb) | 780 | CUGACGUUACAUCAUACACAA | 931 |
| CS915878-C | (invAb)scugacgUfuAfcAfucauacacaas(invAb) | 781 | CUGACGUUACAUCAUACACAA | 931 |
| CS915879-C | (invAb)scugacguuAfcAfUfcauacacaas(invAb) | 782 | CUGACGUUACAUCAUACACAA | 931 |
| CS915889-C | (invAb)scagguguuUfaUfuggcuuuguas(invAb) | 783 | CAGGUGUUUAUUGGCUUUGUA | 933 |
| CS915890-C | (invAb)scaggugUfuUfaUfuggcuuuguas(invAb) | 784 | CAGGUGUUUAUUGGCUUUGUA | 933 |
| CS915891-C | (invAb)scagguguuUfaUfUfggcuuuguas9invAb) | 785 | CAGGUGUUUAUUGGCUUUGUA | 933 |

I = hypoxanthine (inosine) nucleotide

TABLE 6
HTT Agent Sense Strand Sequences (shown with lipid binding moiety or antigen binding moiety).
The structure of the lipid binding moieties are shown in Table 10,
and antigen binding moieties are shown in Tables A and B.

| | | | Corresponding |
|---|---|---|---|
| | | | Sense Strand |
| | | | AM Number |
| | | | Without Linker |
| | | | or Conjugate |
| Strand ID | Modified Sense Strand (5′ -> 3′) | SEQ ID NO. | (See Table 4) |
| CS005558 | Fab0016-L20-(NH- | 786 | CS005558-NL |
| | C6)s(invAb)scugacguuAfCfAfucauacacaas(invAb) | | |
| CS005559 | Fab0016-L20-(NH- | 787 | CS005559-NL |
| | C6)s(invAb)scuugaacuAfCfAfucgaucaugas(invAb) | | |
| CS005560 | Fab0016-L20-(NH- | 788 | CS005560-NL |
| | C6)s(invAb)scagguguuUfAfUfuggcuuuguas(invAb) | | |
| CS005561 | Fab0016-L20-(NH- | 789 | CS005561-NL |
| | C6)s(invAb)saggcaauuCfAfGfucucguuguas(invAb) | | |
| CS006560 | LP293-(NH-C6)s(invAb)scugaugaaGfGfCfuuucgagucas(invAb) | 790 | CS006560-NL |
| CS006700 | LP293-(NH-C6)s(invAb)scuggagcaAfGfUfugaaugaucas(invAb) | 791 | CS006700-NL |
| CS006703 | LP293-(NH-C6)s(invAb)scuggagcaAfgUfugaaugaucus(invAb) | 792 | CS006703-NL |
| CS006704 | LP293-(NH-C6)s(invAb)scuggagcaAfgUfUfgaaugaucus(invAb) | 793 | CS006704-NL |
| CS006705 | LP293-(NH-C6)s(invAb)scuggagcaAfgUfuGfaaugaucus(invAb) | 794 | CS006705-NL |
| CS006708 | LP293-(NH-C6)s(invAb)scuggagcaAfGfUfugaaugauuus(invAb) | 795 | CS006708-NL |
| CS006712 | LP293-(NH-C6)s(invAb)saggcaauuCfaGfucucguuguas(invAb) | 796 | CS006712-NL |
| CS006713 | LP293-(NH-C6)s(invAb)saggcaauuCfaGfUfcucguuguas(invAb) | 797 | CS006713-NL |
| CS006714 | LP293-(NH-C6)s(invAb)saggcaauuCfaGfuCfucguuguas(invAb) | 798 | CS006714-NL |
| CS006717 | LP293-(NH-C6)s(invAb)saggcaauuCfAfGfucuuguuguas(invAb) | 799 | CS006717-NL |
| CS006719 | LP293-(NH-C6)s(invAb)sagguaauuCfAfGfucucguuguas(invAb) | 800 | CS006719-NL |
| CS006720 | LP293-(NH-C6)s(invAb)saggcaauuCfAfGfuuucguuguas(invAb) | 801 | CS006720-NL |
| CS006723 | LP293-(NH-C6)s(invAb)sccaugcaaGfaCfucacuuaguas(invAb) | 802 | CS006723-NL |
| CS006724 | LP293-(NH-C6)s(invAb)sccaugcaaGfaCfUfcacuuaguas(invAb) | 803 | CS006724-NL |
| CS006725 | LP293-(NH-C6)s(invAb)sccaugcaaGfaCfuCfacuuaguas(invAb) | 804 | CS006725-NL |
| CS006728 | LP293-(NH-C6)s(invAb)sccauguaaGfAfCfucacuuaguas(invAb) | 805 | CS006728-NL |
| CS006730 | LP293-(NH-C6)s(invAb)sccaugcaaGfAfCfucauuuaguas(invAb) | 806 | CS006730-NL |
| CS006732 | LP293-(NH-C6)s(invAb)sccaugcaaGfAfCfuuacuuaguas(invAb) | 807 | CS006732-NL |
| CS007256 | Fab0016-L20-(NH- | 808 | CS007256-NL |
| | C6)s(invAb)scugaugaaGfGfCfcuucgagucas(invAb) | | |
| CS007257 | Fab0016-L20-(NH- | 809 | CS007257-NL |
| | C6)s(invAb)sccagcacaAfAfGfuuacuuaguas(invAb) | | |
| CS007258 | Fab0016-L20-(NH- | 810 | CS007258-NL |
| | C6)s(invAb)scaguacagGfAfCfuucaucaguas(invAb) | | |
| CS007259 | Fab0016-L20-(NH- | 811 | CS007259-NL |
| | C6)s(invAb)sccaugcaaGfAfCfucacuuaguas(invAb) | | |
| CS007260 | Fab0016-L20-(NH- | 812 | CS007260-NL |
| | C6)s(invAb)scuggagcaAfGfUfugaaugaucus(invAb) | | |
| CS008020 | LP293-(NH-C6)s(invAb)scuggagcaAfgUfuGfaaugaucas(invAb) | 813 | CS008020-NL |
| CS008022 | LP293-(NH-C6)s(invAb)scuggagcaAfgUfuGfaaugauuas(invAb) | 814 | CS008022-NL |
| CS008023 | LP293-(NH-C6)s(invAb)sagguaauuCfaGfuCfucguuguas(invAb) | 815 | CS008023-NL |
| CS008137 | LP293-(NH-C6)s(invAb)sccaugcaaGfaCfUfuacuuaguas(invAb) | 816 | CS008137-NL |
| CS009303 | Fab0070-L20-(NH- | 817 | CS009303-NL |
| | C6)s(invAb)saggcaauuCfAfGfucucguuguas(invAb) | | |
| CS009304 | Fab0070-L20-(NH- | 818 | CS009304-NL |
| | C6)s(invAb)scuggagcaAfGfUfugaaugaucus(invAb) | | |
| CS009305 | Fab0070-L20-(NH- | 819 | CS009305-NL |
| | C6)s(invAb)saggcaauuCfaGfuCfucguuguas(invAb) | | |
| CS009306 | Fab0070-L20-(NH- | 820 | CS009306-NL |
| | C6)s(invAb)scuggagcaAfgUfuGfaaugaucas(invAb) | | |
| CS009307 | Fab0070-L1026-C6s(invAb)saggcaauuCfaGfuCfucguuguas(invAb) | 821 | CS009307-NL |
| CS009417 | Fab0070-L1026-C6s(invAb)sccaugcaaGfaCfUfcacuuaguas(invAb) | 822 | CS009417-NL |
| CS009418 | Fab0070-L1026-C6s(invAb)scuggagcaAfgUfuGfaaugaucas(invAb) | 823 | CS009418-NL |
| CS009419 | Fab0070-L1026-C6s(invAb)saggcaauuCfAfGfucucguuguas(invAb) | 824 | CS009419-NL |
| CS009420 | Fab0070-L1026-C6s(invAb)scuggagcaAfGfUfugaaugaucus(invAb) | 825 | CS009420-NL |
| CS913031 | LP183s(invAb)saaacagauCfAfUfuggaauuccus(invAb) | 826 | CS913031-NL |
| CS913032 | LP183s(invAb)sugugauuaUfGfUfcugucagaaas(invAb) | 827 | CS913032-NL |
| CS914492 | LP293-(NH-C6)s(invAb)sugugauuaUfGfUfcugucagaaas(invAb) | 828 | CS914492-NL |
| CS914493 | LP293-(NH-C6)s(invAb)saaacagauCfAfUfuggaauuccus(invAb) | 829 | CS914493-NL |
| CS914576 | LP293-(NH-C6)s(invAb)scgcucaggUfUfCfugcuuuuacas(invAb) | 830 | CS914576-NL |
| CS914578 | LP293-(NH-C6)s(invAb)sgacccuggAfAfAfagcugaugaas(invAb) | 831 | CS914578-NL |
| CS914580 | LP293-(NH-C6)s(invAb)suggaaaagCfUfGfaugaaggccus(invAb) | 832 | CS914580-NL |
| CS914582 | LP293-(NH-C6)s(invAb)scugaugaaGfGfCfcuucgagucas(invAb) | 833 | CS914582-NL |
| CS914584 | LP293-(NH-C6)s(invAb)sggccuucgAfGfUfcccucaaguas(invAb) | 834 | CS914584-NL |
| CS914586 | LP293-(NH-C6)s(invAb)sgccuucgaGfUfCfccucaagucas(invAb) | 835 | CS914586-NL |
| CS914588 | LP293-(NH-C6)s(invAb)scaucgcuaUfGfGfaacuuuuucus(invAb) | 836 | CS914588-NL |
| CS914590 | LP293-(NH-C6)s(invAb)sgcuuugauGfGfAfuucuaaucuus(invAb) | 837 | CS914590-NL |
| CS914592 | LP293-(NH-C6)s(invAb)sgauggauuCfUfAfaucuuccaaas(invAb) | 838 | CS914592-NL |
| CS914594 | LP293-(NH-C6)s(invAb)suggcaauuUfUfGfcaaaugacaas(invAb) | 839 | CS914594-NL |
| CS914596 | LP293-(NH-C6)s(invAb)scugacguuAfCfAfucauacacaas(invAb) | 840 | CS914596-NL |
| CS914598 | LP293-(NH-C6)s(invAb)sgcaccaagAfCfCfacaauguugus(invAb) | 841 | CS914598-NL |
| CS914600 | LP293-(NH-C6)s(invAb)sgaguauugUfGfGfaacuuauagas(invAb) | 842 | CS914600-NL |
| CS914602 | LP293-(NH-C6)s(invAb)scuugaacuAfCfAfucgaucaugas(invAb) | 843 | CS914602-NL |
| CS914604 | LP293-(NH-C6)s(invAb)suggaugcuGfUfGfaagcuuuguas(invAb) | 844 | CS914604-NL |
| CS914606 | LP293-(NH-C6)s(invAb)scagguccuGfUfUfacaacaaguas(invAb) | 845 | CS914606-NL |
| CS914608 | LP293-(NH-C6)s(invAb)scaacaaguAfAfAfuccucaucaas(invAb) | 846 | CS914608-NL |
| CS914610 | LP293-(NH-C6)s(invAb)sccaaugauGfGfCfaacuguuugus(invAb) | 847 | CS914610-NL |
| CS914612 | LP293-(NH-C6)s(invAb)scagguguuUfAfUfuggcuuuguas(invAb) | 848 | CS914612-NL |
| CS914614 | LP293-(NH-C6)s(invAb)saagcgacuGfUfCfucgacagauas(invAb) | 849 | CS914614-NL |
| CS914616 | LP293-(NH-C6)s(invAb)succgugagCfAfCfuguucaacuas(invAb) | 850 | CS914616-NL |
| CS914618 | LP293-(NH-C6)s(invAb)sccagcacaAfAfGfuuacuuaguas(invAb) | 851 | CS914618-NL |
| CS914620 | LP293-(NH-C6)s(invAb)sgcagccaaAfCfUfuggaaugugas(invAb) | 852 | CS914620-NL |
| CS914622 | LP293-(NH-C6)s(invAb)sgugcaauaGfAfGfaaauaguacas(invAb) | 853 | CS914622-NL |
| CS914624 | LP293-(NH-C6)s(invAb)scugucagaAfCfCfuccaugacuas(invAb) | 854 | CS914624-NL |
| CS914626 | LP293-(NH-C6)s(invAb)sgcucauugUfAfAfaucacauucas(invAb) | 855 | CS914626-NL |
| CS914628 | LP293-(NH-C6)s(invAb)scaguacagGfAfCfuucaucaguas(invAb) | 856 | CS914628-NL |
| CS914630 | LP293-(NH-C6)s(invAb)saggcaauuCfAfGfucucguuguas(invAb) | 857 | CS914630-NL |
| CS914632 | LP293-(NH-C6)s(invAb)sguugccaaUfGfGfaagaacucaas(invAb) | 858 | CS914632-NL |
| CS914634 | LP293-(NH-C6)s(invAb)sccaugcaaGfAfCfucacuuaguas(invAb) | 859 | CS914634-NL |
| CS914636 | LP293-(NH-C6)s(invAb)sagggaugaGfUfGfaaauuucugas(invAb) | 860 | CS914636-NL |
| CS914638 | LP293-(NH-C6)s(invAb)scuggagcaAfGfUfugaaugaucus(invAb) | 861 | CS914638-NL |
| CS914971 | LP293-(NH-C6)s(invAb)scgacccugGfAfAfaagcuiaugas(invAb) | 862 | CS914971-NL |
| CS914973 | LP293-(NH-C6)s(invAb)sgcugaugaAfGfGfccuuciaguas(invAb) | 863 | CS914973-NL |
| CS914975 | LP293-(NH-C6)s(invAb)scgcugcacCfGfAfccaaagaaaas(invAb) | 864 | CS914975-NL |
| CS914977 | LP293-(NH-C6)s(invAb)sgcugcaccGfAfCfcaaagaaagas(invAb) | 865 | CS914977-NL |
| CS914979 | LP293-(NH-C6)s(invAb)scugcaccgAfCfCfaaagaaagaas(invAb) | 866 | CS914979-NL |
| CS915157 | LP293-(NH-C6)s(invAb)scugaugaaGfgCfcuucgagucas(invAb) | 867 | CS915157-NL |
| CS915158 | LP293-(NH-C6)s(invAb)scugaugAfaGfgCfcuucgagucas(invAb) | 868 | CS915158-NL |
| CS915159 | LP293-(NH-C6)s(invAb)scugaugaaGfgCfCfuucgagucas(invAb) | 869 | CS915159-NL |
| CS915865 | LP293-(NH-C6)s(invAb)scuugaacuAfcAfucgaucaugas(invAb) | 870 | CS915865-NL |
| CS915866 | LP293-(NH-C6)s(invAb)scuugaaCfuAfcAfucgaucaugas(invAb) | 871 | CS915866-NL |
| CS915867 | LP293-(NH-C6)s(invAb)scuugaacuAfcAfUfcgaucaugas(invAb) | 872 | CS915867-NL |
| CS915877 | LP293-(NH-C6)s(invAb)scugacguuAfcAfucauacacaas(invAb) | 873 | CS915877-NL |
| CS915878 | LP293-(NH-C6)s(invAb)scugacgUfuAfcAfucauacacaas(invAb) | 874 | CS915878-NL |
| CS915879 | LP293-(NH-C6)s(invAb)scugacguuAfcAfUfcauacacaas(invAb) | 875 | CS915879-NL |
| CS915889 | LP293-(NH-C6)s(invAb)scagguguuUfaUfuggcuuuguas(invAb) | 876 | CS915889-NL |
| CS915890 | LP293-(NH-C6)s(invAb)scaggugUfuUfaUfuggcuuuguas(invAb) | 877 | CS915890-NL |
| CS915891 | LP293-(NH-C6)s(invAb)scagguguuUfaUfUfggcuuuguas(invAb) | 878 | CS915891-NL |

[0158] The HTT RNAi agents disclosed herein are formed by annealing an antisense strand with a sense strand. A sense strand containing a sequence listed in Table 2, Table 4, Table 5, or Table 6 can be hybridized to any antisense strand containing a sequence listed in Table 2 or Table 3, provided the two sequences have a region of at least 85% complementarity over a contiguous 16, 17, 18, 19, 20, or 21 nucleotide sequence.

[0159] As shown in Table 5 above, certain of the example HTT RNAi agent nucleotide sequences are shown to further include reactive linking groups at one or both of the 5′ terminal end and the 3′ terminal end of the sense strand. For example, many of the HTT RNAi agent sense strand sequences shown in Table 5 above have a (NH2-C6) linking group at the 5′ end of the nucleotide sequence. Other linking groups, such as a (6-SS-6) linking group or a (C6-SS-C6) linking group, may be present as well or alternatively in certain embodiments. Such reactive linking groups are positioned to facilitate the linking of targeting ligands, targeting groups, and/or antigen binding proteins to the HTT RNAi agents disclosed herein. Linking or conjugation reactions are well known in the art and provide for formation of covalent linkages between two molecules or reactants. Suitable conjugation reactions for use in the scope of the inventions herein include, but are not limited to, amide coupling reaction, Michael addition reaction, hydrazone formation reaction, inverse demand Diels-Alder cycloaddition reaction, oxime ligation, and Copper (I)—catalyzed or strain-promoted azide-alkyne cycloaddition reaction.

[0160] In some embodiments, targeting ligands, can be synthesized as activated esters, such as tetrafluorophenyl (TFP) esters, which can be displaced by a reactive amino group (e.g., NH₂-C₆) to attach the targeting ligand to the HTT RNAi agents disclosed herein. In some embodiments, targeting ligands are synthesized as azides, which can be conjugated to a propargyl or DBCO group, for example, via Copper (I)—catalyzed or strain-promoted azide-alkyne cycloaddition reaction.

[0161] Additionally, certain of the nucleotide sequences can be synthesized with a dT nucleotide at the 3′ terminal end of the sense strand, followed by (3′→5′) a linker (e.g., C6-SS-C6). The linker can, in some embodiments, facilitate the linkage to additional components, such as, for example, an antigen binding protein or one or more targeting ligands. As described herein, the disulfide bond of C6-SS-C6 is first reduced, removing the dT from the molecule, which can then facilitate the conjugation of the desired component. The terminal dT nucleotide therefore is not a part of the fully conjugated construct.

[0162] In some embodiments, the antisense strand of an HTT RNAi agent disclosed herein differs by 0, 1, 2, or 3 nucleotides from any of the antisense strand sequences in Table 3 or Table 9. In some embodiments, the sense strand of an HTT RNAi agent disclosed herein differs by 0, 1, 2, or 3 nucleotides from any of the sense strand sequences in Table 4, Table 5, Table 6, or Table 9.

[0163] In some embodiments, an HTT RNAi agent antisense strand comprises a nucleotide sequence of any of the sequences in Table 2 or Table 3. In some embodiments, an HTT RNAi agent antisense strand comprises the sequence of nucleotides (from 5′ end→3′ end) 1-17, 2-17, 1-18, 2-18, 1-19, 2-19, 1-20, 2-20, 1-21, 2-21, 1-22, 2-22, 1-23, 2-23, 1-24, or 2-24 of any of the sequences in Table 2, Table 3, or Table 9. In certain embodiments, an HTT RNAi agent antisense strand comprises or consists of a modified sequence of any one of the modified sequences in Table 3 or Table 9.

[0164] In some embodiments, an HTT RNAi agent sense strand comprises the nucleotide sequence of any of the sequences in Table 2 or Table 4. In some embodiments, an HTT RNAi agent sense strand comprises the sequence of nucleotides (from 5′ end→3′ end) 1-17, 2-17, 3-17, 4-17, 1-18, 2-18, 3-18, 4-18, 1-19, 2-19, 3-19, 4-19, 1-20, 2-20, 3-20, 4-20, 1-21, 2-21, 3-21, 4-21, 1-22, 2-22, 3-22, 4-22, 1-23, 2-23, 3-23, 4-23, 1-24, 2-24, 3-24, or 4-24, of any of the sequences in Table 2, Table 4, Table 5, Table 6, or Table 9. In certain embodiments, an HTT RNAi agent sense strand comprises or consists of a modified sequence of any one of the modified sequences in Table 6 or Table 9.

[0165] For the RNAi agents disclosed herein, the nucleotide at position 1 of the antisense strand (from 5′ end→3′ end) can be perfectly complementary to an HTT gene, or can be non-complementary to an HTT gene. In some embodiments, the nucleotide at position 1 of the antisense strand (from 5′ end→3′ end) is a U, A, or dT (or a modified version of U, A or dT). In some embodiments, the nucleotide at position 1 of the antisense strand (from 5′ end→3′ end) forms an A:U or U:A base pair with the sense strand.

[0166] In some embodiments, an HTT RNAi agent antisense strand comprises the sequence of nucleotides (from 5′ end→3′ end) 2-18 or 2-19 of any of the antisense strand sequences in Table 2, Table 3, or Table 9. In some embodiments, an HTT RNAi sense strand comprises the sequence of nucleotides (from 5′ end→3′ end) 1-17 or 1-18 of any of the sense strand sequences in Table 2, Table 4, Table 5, Table 6, or Table 9.

[0167] In some embodiments, an HTT RNAi agent includes (i) an antisense strand comprising the sequence of nucleotides (from 5′ end→3′ end) 2-18 or 2-19 of any of the antisense strand sequences in Table 2, Table 3, or Table 9, and (ii) a sense strand comprising the sequence of nucleotides (from 5′ end→3′ end) 1-17 or 1-18 of any of the sense strand sequences in Table 2, Table 4, Table 5, Table 6, or Table 9.

[0168] A sense strand containing a sequence listed in Table 2 or Table 4 can be hybridized to any antisense strand containing a sequence listed in Table 2 or Table 3 provided the two sequences have a region of at least 85% complementarity over a contiguous 16, 17, 18, 19, 20, or 21 nucleotide sequence. In some embodiments, the HTT RNAi agent has a sense strand consisting of the modified sequence of any of the modified sequences in Table 4, Table 5, Table 6, or Table 9, and an antisense strand consisting of the modified sequence of any of the modified sequences in Table 3 or Table 9. Certain representative sequence pairings are exemplified by the Duplex ID Nos. shown in Tables 7, 8, and 9.

[0169] In some embodiments, an HTT RNAi agent comprises, consists of, or consists essentially of a duplex represented by any one of the Duplex ID Nos. presented herein. In some embodiments, an HTT RNAi agent consists of any of the Duplex ID Nos. presented herein. In some embodiments, an HTT RNAi agent comprises the sense strand and antisense strand nucleotide sequences of any of the Duplex ID Nos. presented herein. In some embodiments, an HTT RNAi agent comprises the sense strand and antisense strand nucleotide sequences of any of the Duplex ID Nos. presented herein and a targeting group, linking group, antigen binding protein and/or other non-nucleotide group wherein the targeting group, linking group, antigen binding protein and/or other non-nucleotide group is covalently linked (i.e., conjugated) to the sense strand or the antisense strand. In some embodiments, an HTT RNAi agent includes the sense strand and antisense strand modified nucleotide sequences of any of the Duplex ID Nos. presented herein. In some embodiments, an HTT RNAi agent comprises the sense strand and antisense strand modified nucleotide sequences of any of the Duplex ID Nos. presented herein and a targeting group, linking group, and/or other non-nucleotide group, wherein the targeting group, linking group, antigen binding protein and/or other non-nucleotide group is covalently linked to the sense strand or the antisense strand.

[0170] In some embodiments, an HTT RNAi agent comprises an antisense strand and a sense strand having the nucleotide sequences of any of the antisense strand/sense strand duplexes of Tables 2, 7, 8, or 9, and comprises an antigen binding protein. In some embodiments, an HTT RNAi agent comprises an antisense strand and a sense strand having the nucleotide sequences of any of the antisense strand/sense strand duplexes of Tables 2, 7, 8, or 9, and comprises one or more antigen binding proteins.

[0171] In some embodiments, an HTT RNAi agent comprises an antisense strand and a sense strand having the nucleotide sequences of any of the antisense strand/sense strand duplexes of Tables 2, 7, 8, or 9, and comprises an antigen binding protein. In some embodiments, an HTT RNAi agent comprises an antisense strand and a sense strand having the nucleotide sequences of any of the antisense strand/sense strand duplexes of Tables 2, 7, 8, or 9, and comprises one or more antigen binding protein.

[0172] In some embodiments, an HTT RNAi agent comprises an antisense strand and a sense strand having the modified nucleotide sequences of any of the antisense strand/sense strand duplexes of Tables 7, 8, and 9.

[0173] In some embodiments, an HTT RNAi agent comprises an antisense strand and a sense strand having the modified nucleotide sequences of any of the antisense strand/sense strand duplexes of Tables 7, 8, and 9, and comprises an antigen binding protein.

[0174] In some embodiments, an HTT RNAi agent comprises, consists of, or consists essentially of any of the duplexes of Tables 7, 8, and 9.

TABLE 7
HTT RNAi Agent Duplexes with Corresponding Sense and Antisense Strand ID Numbers
and Sequence ID numbers for the modified and unmodified nucleotide sequences.

| | | AS modified | AS unmodified | | SS modified | SS unmodified |
|---|---|---|---|---|---|---|
| Duplex | AS ID | SEQ ID NO: | SEQ ID NO: | SS ID | SEQ ID NO: | SEQ ID NO: |
| AC004413 | CA005452 | 452 | 879 | CS914630 | 857 | 934 |
| AC004496 | CA914597 | 503 | 904 | CS005558 | 786 | 931 |
| AC004497 | CA914603 | 506 | 907 | CS005559 | 787 | 932 |
| AC004498 | CA914613 | 511 | 912 | CS005560 | 788 | 933 |
| AC004499 | CA914631 | 520 | 879 | CS005561 | 789 | 934 |
| AC004563 | CA005655 | 453 | 880 | CS914638 | 861 | 938 |
| AC004564 | CA005656 | 454 | 881 | CS914634 | 859 | 943 |
| AC004575 | CA005667 | 455 | 880 | CS914638 | 861 | 938 |
| AC004576 | CA005668 | 456 | 881 | CS914634 | 859 | 943 |
| AC004577 | CA005669 | 457 | 879 | CS914630 | 857 | 934 |
| AC005385 | CA006561 | 460 | 883 | CS006560 | 790 | 936 |
| AC005500 | CA006699 | 461 | 880 | CS914638 | 861 | 938 |
| AC005501 | CA006701 | 462 | 884 | CS006700 | 791 | 937 |
| AC005502 | CA006702 | 463 | 885 | CS914638 | 861 | 938 |
| AC005503 | CA005667 | 455 | 880 | CS006703 | 792 | 938 |
| AC005504 | CA005667 | 455 | 880 | CS006704 | 793 | 938 |
| AC005505 | CA006706 | 464 | 880 | CS914638 | 861 | 938 |
| AC005506 | CA006707 | 465 | 880 | CS914638 | 861 | 938 |
| AC005507 | CA005667 | 455 | 880 | CS006708 | 795 | 939 |
| AC005508 | CA006709 | 466 | 886 | CS914638 | 861 | 938 |
| AC005509 | CA006710 | 467 | 887 | CS914638 | 861 | 938 |
| AC005510 | CA005667 | 455 | 880 | CS006705 | 794 | 938 |
| AC005511 | CA006711 | 468 | 879 | CS914630 | 857 | 934 |
| AC005512 | CA005669 | 457 | 879 | CS006712 | 796 | 934 |
| AC005513 | CA005669 | 457 | 879 | CS006713 | 797 | 934 |
| AC005514 | CA005669 | 457 | 879 | CS006714 | 798 | 934 |
| AC005515 | CA006715 | 469 | 879 | CS914630 | 857 | 934 |
| AC005516 | CA006716 | 470 | 879 | CS914630 | 857 | 934 |
| AC005517 | CA005669 | 457 | 879 | CS006717 | 799 | 940 |
| AC005518 | CA006718 | 471 | 888 | CS914630 | 857 | 934 |
| AC005519 | CA005669 | 457 | 879 | CS006719 | 800 | 941 |
| AC005520 | CA005669 | 457 | 879 | CS006720 | 801 | 942 |
| AC005521 | CA006721 | 472 | 879 | CS914630 | 857 | 934 |
| AC005522 | CA006722 | 473 | 881 | CS914634 | 859 | 943 |
| AC005523 | CA005668 | 456 | 881 | CS006723 | 802 | 943 |
| AC005524 | CA005668 | 456 | 881 | CS006724 | 803 | 943 |
| AC005525 | CA005668 | 456 | 881 | CS006725 | 804 | 943 |
| AC005526 | CA006726 | 474 | 881 | CS914634 | 859 | 943 |
| AC005527 | CA006727 | 475 | 881 | CS914634 | 859 | 943 |
| AC005528 | CA006729 | 476 | 889 | CS006728 | 805 | 944 |
| AC005529 | CA005668 | 456 | 881 | CS006730 | 806 | 945 |
| AC005530 | CA006731 | 477 | 890 | CS914634 | 859 | 943 |
| AC005531 | CA005668 | 456 | 881 | CS006732 | 807 | 946 |
| AC005532 | CA006733 | 478 | 881 | CS914634 | 859 | 943 |
| AC005533 | CA006734 | 479 | 891 | CS914638 | 861 | 938 |
| AC005956 | CA914597 | 503 | 904 | CS005558 | 786 | 931 |
| AC005957 | CA914603 | 506 | 907 | CS005559 | 787 | 932 |
| AC005958 | CA914613 | 511 | 912 | CS005560 | 788 | 933 |
| AC005959 | CA914631 | 520 | 879 | CS005561 | 789 | 934 |
| AC005998 | CA914619 | 514 | 915 | CS007257 | 809 | 948 |
| AC005999 | CA914629 | 519 | 920 | CS007258 | 810 | 949 |
| AC006000 | CA914635 | 522 | 881 | CS007259 | 811 | 943 |
| AC006001 | CA914639 | 524 | 880 | CS007260 | 812 | 938 |
| AC006002 | CA914583 | 496 | 897 | CS007256 | 808 | 947 |
| AC006704 | CA008019 | 480 | 885 | CS006705 | 794 | 938 |
| AC006705 | CA008021 | 481 | 884 | CS008020 | 813 | 937 |
| AC006706 | CA008021 | 481 | 884 | CS008022 | 814 | 950 |
| AC006707 | CA006711 | 468 | 879 | CS006714 | 798 | 934 |
| AC006708 | CA006711 | 468 | 879 | CS006719 | 800 | 941 |
| AC006709 | CA006711 | 468 | 879 | CS008023 | 815 | 941 |
| AC006805 | CA006722 | 473 | 881 | CS006724 | 803 | 943 |
| AC006806 | CA005668 | 456 | 881 | CS008137 | 816 | 946 |
| AC006807 | CA006722 | 473 | 881 | CS008137 | 816 | 946 |
| AC007863 | CA914631 | 520 | 879 | CS009303 | 817 | 934 |
| AC007864 | CA914639 | 524 | 880 | CS009304 | 818 | 938 |
| AC007865 | CA006711 | 468 | 879 | CS009305 | 819 | 934 |
| AC007866 | CA008021 | 481 | 884 | CS009306 | 820 | 937 |
| AC007867 | CA006711 | 468 | 879 | CS009307 | 821 | 934 |
| AC007952 | CA005668 | 456 | 881 | CS009417 | 822 | 943 |
| AC007953 | CA008021 | 481 | 884 | CS009418 | 823 | 937 |
| AC007968 | CA914631 | 520 | 879 | CS009419 | 824 | 934 |
| AC007969 | CA914639 | 524 | 880 | CS009420 | 825 | 938 |
| AC910139 | CA911803 | 482 | 892 | CS913031 | 826 | 951 |
| AC910140 | CA911821 | 483 | 893 | CS913032 | 827 | 952 |
| AC910577 | CA913562 | 484 | 892 | CS913031 | 826 | 951 |
| AC910578 | CA913563 | 485 | 892 | CS913031 | 826 | 951 |
| AC910579 | CA913564 | 486 | 892 | CS913031 | 826 | 951 |
| AC910580 | CA913565 | 487 | 892 | CS913031 | 826 | 951 |
| AC910581 | CA913566 | 488 | 892 | CS913031 | 826 | 951 |
| AC910582 | CA913567 | 489 | 892 | CS913031 | 826 | 951 |
| AC910583 | CA913568 | 490 | 892 | CS913031 | 826 | 951 |
| AC910584 | CA913569 | 491 | 892 | CS913031 | 826 | 951 |
| AC910585 | CA913570 | 492 | 892 | CS913031 | 826 | 951 |
| AC911226 | CA911821 | 483 | 893 | CS914492 | 828 | 952 |
| AC911227 | CA911803 | 482 | 892 | CS914493 | 829 | 951 |
| AC911290 | CA914577 | 493 | 894 | CS914576 | 830 | 953 |
| AC911291 | CA914579 | 494 | 895 | CS914578 | 831 | 954 |
| AC911292 | CA914581 | 495 | 896 | CS914580 | 832 | 955 |
| AC911293 | CA914583 | 496 | 897 | CS914582 | 833 | 947 |
| AC911294 | CA914585 | 497 | 898 | CS914584 | 834 | 956 |
| AC911295 | CA914587 | 498 | 899 | CS914586 | 835 | 957 |
| AC911296 | CA914589 | 499 | 900 | CS914588 | 836 | 968 |
| AC911297 | CA914591 | 500 | 901 | CS914590 | 837 | 959 |
| AC911298 | CA914593 | 501 | 902 | CS914592 | 838 | 960 |
| AC911299 | CA914595 | 502 | 903 | CS914594 | 839 | 961 |
| AC911300 | CA914597 | 503 | 904 | CS914596 | 840 | 931 |
| AC911301 | CA914599 | 504 | 905 | CS914598 | 841 | 962 |
| AC911302 | CA914601 | 505 | 906 | CS914600 | 842 | 963 |
| AC911303 | CA914603 | 506 | 907 | CS914602 | 843 | 932 |
| AC911304 | CA914605 | 507 | 908 | CS914604 | 844 | 964 |
| AC911305 | CA914607 | 508 | 909 | CS914606 | 845 | 965 |
| AC911306 | CA914609 | 509 | 910 | CS914608 | 846 | 966 |
| AC911307 | CA914611 | 510 | 911 | CS914610 | 847 | 967 |
| AC911308 | CA914613 | 511 | 912 | CS914612 | 848 | 933 |
| AC911309 | CA914615 | 512 | 913 | CS914614 | 849 | 968 |
| AC911310 | CA914617 | 513 | 914 | CS914616 | 850 | 969 |
| AC911311 | CA914619 | 514 | 915 | CS914618 | 851 | 948 |
| AC911312 | CA914621 | 515 | 916 | CS914620 | 852 | 970 |
| AC911313 | CA914623 | 516 | 917 | CS914622 | 853 | 971 |
| AC911314 | CA914625 | 517 | 918 | CS914624 | 854 | 972 |
| AC911315 | CA914627 | 518 | 919 | CS914626 | 855 | 973 |
| AC911316 | CA914629 | 519 | 920 | CS914628 | 856 | 949 |
| AC911317 | CA914631 | 520 | 879 | CS914630 | 857 | 934 |
| AC911318 | CA914633 | 521 | 921 | CS914632 | 858 | 974 |
| AC911319 | CA914635 | 522 | 881 | CS914634 | 859 | 943 |
| AC911320 | CA914637 | 523 | 922 | CS914636 | 860 | 975 |
| AC911321 | CA914639 | 524 | 880 | CS914638 | 861 | 938 |
| AC911599 | CA914972 | 525 | 923 | CS914971 | 862 | 976 |
| AC911600 | CA914974 | 526 | 924 | CS914973 | 863 | 977 |
| AC911601 | CA914976 | 527 | 925 | CS914975 | 864 | 978 |
| AC911602 | CA914978 | 528 | 926 | CS914977 | 865 | 979 |
| AC911603 | CA914980 | 529 | 927 | CS914979 | 866 | 980 |
| AC911758 | CA915153 | 530 | 897 | CS914582 | 833 | 947 |
| AC911759 | CA915154 | 531 | 897 | CS914582 | 833 | 947 |
| AC911760 | CA915155 | 532 | 897 | CS914582 | 833 | 947 |
| AC911761 | CA915156 | 533 | 89 | CS914582 | 833 | 947 |
| AC911762 | CA915154 | 531 | 897 | CS915157 | 867 | 947 |
| AC911763 | CA915154 | 531 | 897 | CS915158 | 868 | 947 |
| AC911764 | CA915154 | 531 | 897 | CS915159 | 869 | 947 |
| AC911765 | CA915160 | 534 | 897 | CS914582 | 833 | 947 |
| AC911766 | CA915161 | 535 | 897 | CS914582 | 833 | 947 |
| AC911767 | CA915162 | 536 | 897 | CS914582 | 833 | 947 |
| AC912419 | CA915860 | 537 | 907 | CS914602 | 843 | 932 |
| AC912420 | CA915861 | 538 | 907 | CS914602 | 843 | 932 |
| AC912421 | CA915862 | 539 | 907 | CS914602 | 843 | 932 |
| AC912422 | CA915863 | 540 | 907 | CS914602 | 843 | 932 |
| AC912423 | CA915864 | 541 | 907 | CS914602 | 843 | 932 |
| AC912424 | CA915862 | 539 | 907 | CS915865 | 870 | 932 |
| AC912425 | CA915862 | 539 | 907 | CS915866 | 871 | 932 |
| AC912426 | CA915862 | 539 | 907 | CS915867 | 872 | 932 |
| AC912427 | CA915868 | 542 | 907 | CS914602 | 843 | 932 |
| AC912428 | CA915869 | 543 | 928 | CS914602 | 843 | 932 |
| AC912429 | CA915870 | 544 | 928 | CS914602 | 843 | 932 |
| AC912430 | CA915871 | 545 | 928 | CS914602 | 843 | 932 |
| AC912431 | CA915872 | 546 | 904 | CS914596 | 840 | 931 |
| AC912432 | CA915873 | 547 | 904 | CS914596 | 840 | 931 |
| AC912433 | CA915874 | 548 | 904 | CS914596 | 840 | 931 |
| AC912434 | CA915875 | 549 | 904 | CS914596 | 840 | 931 |
| AC912435 | CA915876 | 550 | 904 | CS914596 | 840 | 931 |
| AC912436 | CA915874 | 548 | 904 | CS915877 | 873 | 931 |
| AC912437 | CA915874 | 548 | 904 | CS915878 | 874 | 931 |
| AC912438 | CA915874 | 548 | 904 | CS915879 | 875 | 931 |
| AC912439 | CA915880 | 551 | 904 | CS914596 | 840 | 931 |
| AC912440 | CA915881 | 552 | 929 | CS914596 | 840 | 931 |
| AC912441 | CA915882 | 553 | 904 | CS914596 | 840 | 931 |
| AC912442 | CA915883 | 554 | 904 | CS914596 | 840 | 931 |
| AC912443 | CA915884 | 555 | 912 | CS914612 | 848 | 933 |
| AC912444 | CA915885 | 556 | 912 | CS914612 | 848 | 933 |
| AC912445 | CA915886 | 557 | 912 | CS914612 | 848 | 933 |
| AC912446 | CA915887 | 558 | 912 | CS914612 | 848 | 933 |
| AC912447 | CA915888 | 559 | 912 | CS914612 | 848 | 933 |
| AC912448 | CA915886 | 557 | 912 | CS915889 | 876 | 933 |
| AC912449 | CA915886 | 557 | 912 | CS915890 | 877 | 933 |
| AC912450 | CA915886 | 557 | 911 | CS915891 | 878 | 933 |
| AC912451 | CA915892 | 560 | 912 | CS914612 | 848 | 933 |
| AC912452 | CA915893 | 561 | 930 | CS914612 | 848 | 933 |
| AC912453 | CA915894 | 562 | 930 | CS914612 | 848 | 933 |
| AC912454 | CA915895 | 563 | 912 | CS914612 | 848 | 933 |

TABLE 8
Conjugate Duplex ID Numbers Referencing Position
Targeted On Huntingtin (HTT) Gene

| | | | Targeted HTT |
|---|---|---|---|
| | | | Gene Position |
| Duplex | AS ID | SS ID | (Of SEQ ID NO: 1) |
| AC004413 | CA005452 | CS914630 | 6015 |
| AC004496 | CA914597 | CS005558 | 1229 |
| AC004497 | CA914603 | CS005559 | 2410 |
| AC004498 | CA914613 | CS005560 | 4556 |
| AC004499 | CA914631 | CS005561 | 6015 |
| AC004563 | CA005655 | CS914638 | 6754 |
| AC004564 | CA005656 | CS914634 | 6348 |
| AC004575 | CA005667 | CS914638 | 6754 |
| AC004576 | CA005668 | CS914634 | 6348 |
| AC004577 | CA005669 | CS914630 | 6015 |
| AC005385 | CA006561 | CS006560 | 164 |
| AC005500 | CA006699 | CS914638 | 6754 |
| AC005501 | CA006701 | CS006700 | 6754 |
| AC005502 | CA006702 | CS914638 | 6754 |
| AC005503 | CA005667 | CS006703 | 6754 |
| AC005504 | CA005667 | CS006704 | 6754 |
| AC005505 | CA006706 | CS914638 | 6754 |
| AC005506 | CA006707 | CS914638 | 6754 |
| AC005507 | CA005667 | CS006708 | 6754 |
| AC005508 | CA006709 | CS914638 | 6754 |
| AC005509 | CA006710 | CS914638 | 6754 |
| AC005510 | CA005667 | CS006705 | 6754 |
| AC005511 | CA006711 | CS914630 | 6015 |
| AC005512 | CA005669 | CS006712 | 6015 |
| AC005513 | CA005669 | CS006713 | 6015 |
| AC005514 | CA005669 | CS006714 | 6015 |
| AC005515 | CA006715 | CS914630 | 6015 |
| AC005516 | CA006716 | CS914630 | 6015 |
| AC005517 | CA005669 | CS006717 | 6015 |
| AC005518 | CA006718 | CS914630 | 6015 |
| AC005519 | CA005669 | CS006719 | 6015 |
| AC005520 | CA005669 | CS006720 | 6015 |
| AC005521 | CA006721 | CS914630 | 6015 |
| AC005522 | CA006722 | CS914634 | 6348 |
| AC005523 | CA005668 | CS006723 | 6348 |
| AC005524 | CA005668 | CS006724 | 6348 |
| AC005525 | CA005668 | CS006725 | 6348 |
| AC005526 | CA006726 | CS914634 | 6348 |
| AC005527 | CA006727 | CS914634 | 6348 |
| AC005528 | CA006729 | CS006728 | 6348 |
| AC005529 | CA005668 | CS006730 | 6348 |
| AC005530 | CA006731 | CS914634 | 6348 |
| AC005531 | CA005668 | CS006732 | 6348 |
| AC005532 | CA006733 | CS914634 | 6348 |
| AC005533 | CA006734 | CS914638 | 6754 |
| AC005956 | CA914597 | CS005558 | 1229 |
| AC005957 | CA914603 | CS005559 | 2410 |
| AC005958 | CA914613 | CS005560 | 4556 |
| AC005959 | CA914631 | CS005561 | 6015 |
| AC005998 | CA914619 | CS007257 | 5742 |
| AC005999 | CA914629 | CS007258 | 5955 |
| AC006000 | CA914635 | CS007259 | 6348 |
| AC006001 | CA914639 | CS007260 | 6754 |
| AC006002 | CA914583 | CS007256 | 164 |
| AC006704 | CA008019 | CS006705 | 6754 |
| AC006705 | CA008021 | CS008020 | 6754 |
| AC006706 | CA008021 | CS008022 | 6754 |
| AC006707 | CA006711 | CS006714 | 6015 |
| AC006708 | CA006711 | CS006719 | 6015 |
| AC006709 | CA006711 | CS008023 | 6015 |
| AC006805 | CA006722 | CS006724 | 6348 |
| AC006806 | CA005668 | CS008137 | 6348 |
| AC006807 | CA006722 | CS008137 | 6348 |
| AC007863 | CA914631 | CS009303 | 6015 |
| AC007864 | CA914639 | CS009304 | 6754 |
| AC007865 | CA006711 | CS009305 | 6015 |
| AC007866 | CA008021 | CS009306 | 6754 |
| AC007867 | CA006711 | CS009307 | 6015 |
| AC007952 | CA005668 | CS009417 | 6348 |
| AC007953 | CA008021 | CS009418 | 6754 |
| AC007968 | CA914631 | CS009419 | 6015 |
| AC007969 | CA914639 | CS009420 | 6754 |
| AC910139 | CA911803 | CS913031 | 4685 |
| AC910140 | CA911821 | CS913032 | 5858 |
| AC910577 | CA913562 | CS913031 | 4685 |
| AC910578 | CA913563 | CS913031 | 4685 |
| AC910579 | CA913564 | CS913031 | 4685 |
| AC910580 | CA913565 | CS913031 | 4685 |
| AC910581 | CA913566 | CS913031 | 4685 |
| AC910582 | CA913567 | CS913031 | 4685 |
| AC910583 | CA913568 | CS913031 | 4685 |
| AC910584 | CA913569 | CS913031 | 4685 |
| AC910585 | CA913570 | CS913031 | 4685 |
| AC911226 | CA911821 | CS914492 | 5858 |
| AC911227 | CA911803 | CS914493 | 4685 |
| AC911290 | CA914577 | CS914576 | 30 |
| AC911291 | CA914579 | CS914578 | 151 |
| AC911292 | CA914581 | CS914580 | 156 |
| AC911293 | CA914583 | CS914582 | 164 |
| AC911294 | CA914585 | CS914584 | 172 |
| AC911295 | CA914587 | CS914586 | 173 |
| AC911296 | CA914589 | CS914588 | 529 |
| AC911297 | CA914591 | CS914590 | 620 |
| AC911298 | CA914593 | CS914592 | 625 |
| AC911299 | CA914595 | CS914594 | 868 |
| AC911300 | CA914597 | CS914596 | 1229 |
| AC911301 | CA914599 | CS914598 | 1249 |
| AC911302 | CA914601 | CS914600 | 1405 |
| AC911303 | CA914603 | CS914602 | 2410 |
| AC911304 | CA914605 | CS914604 | 3220 |
| AC911305 | CA914607 | CS914606 | 3798 |
| AC911306 | CA914609 | CS914608 | 3810 |
| AC911307 | CA914611 | CS914610 | 4064 |
| AC911308 | CA914613 | CS914612 | 4556 |
| AC911309 | CA914615 | CS914614 | 4961 |
| AC911310 | CA914617 | CS914616 | 5144 |
| AC911311 | CA914619 | CS914618 | 5742 |
| AC911312 | CA914621 | CS914620 | 5798 |
| AC911313 | CA914623 | CS914622 | 5815 |
| AC911314 | CA914625 | CS914624 | 5869 |
| AC911315 | CA914627 | CS914626 | 5905 |
| AC911316 | CA914629 | CS914628 | 5955 |
| AC911317 | CA914631 | CS914630 | 6015 |
| AC911318 | CA914633 | CS914632 | 6241 |
| AC911319 | CA914635 | CS914634 | 6348 |
| AC911320 | CA914637 | CS914636 | 6604 |
| AC911321 | CA914639 | CS914638 | 6754 |
| AC911599 | CA914972 | CS914971 | 150 |
| AC911600 | CA914974 | CS914973 | 163 |
| AC911601 | CA914976 | CS914975 | 402 |
| AC911602 | CA914978 | CS914977 | 403 |
| AC911603 | CA914980 | CS914979 | 404 |
| AC911758 | CA915153 | CS914582 | 164 |
| AC911759 | CA915154 | CS914582 | 164 |
| AC911760 | CA915155 | CS914582 | 164 |
| AC911761 | CA915156 | CS914582 | 164 |
| AC911762 | CA915154 | CS915157 | 164 |
| AC911763 | CA915154 | CS915158 | 164 |
| AC911764 | CA915154 | CS915159 | 164 |
| AC911765 | CA915160 | CS914582 | 164 |
| AC911766 | CA915161 | CS914582 | 164 |
| AC911767 | CA915162 | CS914582 | 164 |
| AC912419 | CA915860 | CS914602 | 2410 |
| AC912420 | CA915861 | CS914602 | 2410 |
| AC912421 | CA915862 | CS914602 | 2410 |
| AC912422 | CA915863 | CS914602 | 2410 |
| AC912423 | CA915864 | CS914602 | 2410 |
| AC912424 | CA915862 | CS915865 | 2410 |
| AC912425 | CA915862 | CS915866 | 2410 |
| AC912426 | CA915862 | CS915867 | 2410 |
| AC912427 | CA915868 | CS914602 | 2410 |
| AC912428 | CA915869 | CS914602 | 2410 |
| AC912429 | CA915870 | CS914602 | 2410 |
| AC912430 | CA915871 | CS914602 | 2410 |
| AC912431 | CA915872 | CS914596 | 1229 |
| AC912432 | CA915873 | CS914596 | 1229 |
| AC912433 | CA915874 | CS914596 | 1229 |
| AC912434 | CA915875 | CS914596 | 1229 |
| AC912435 | CA915876 | CS914596 | 1229 |
| AC912436 | CA915874 | CS915877 | 1229 |
| AC912437 | CA915874 | CS915878 | 1229 |
| AC912438 | CA915874 | CS915879 | 1229 |
| AC912439 | CA915880 | CS914596 | 1229 |
| AC912440 | CA915881 | CS914596 | 1229 |
| AC912441 | CA915882 | CS914596 | 1229 |
| AC912442 | CA915883 | CS914596 | 1229 |
| AC912443 | CA915884 | CS914612 | 4556 |
| AC912444 | CA915885 | CS914612 | 4556 |
| AC912445 | CA915886 | CS914612 | 4556 |
| AC912446 | CA915887 | CS914612 | 4556 |
| AC912447 | CA915888 | CS914612 | 4556 |
| AC912448 | CA915886 | CS915889 | 4556 |
| AC912449 | CA915886 | CS915890 | 4556 |
| AC912450 | CA915886 | CS915891 | 4556 |
| AC912451 | CA915892 | CS914612 | 4556 |
| AC912452 | CA915893 | CS914612 | 4556 |
| AC912453 | CA915894 | CS914612 | 4556 |
| AC912454 | CA915895 | CS914612 | 4556 |

TABLE 9
Conjugate ID Numbers With Chemically Modified Antisense and Sense Strands
(including Linkers and Conjugates)

| | | SEQ | | SEQ |
|---|---|---|---|---|
| ACID | Sense Strand (Fully Modified with Conjugated | ID | | ID |
| Number | antigen binding protein) (5′ -> 3′) | NO: | Antisense Strand (5′ -> 3′) | NO: |
| AC004413 | LP293-(NH- | 857 | cPrpusAfscaacGfagacUfgAfaUfugccsu | 452 |
| | C6)s(invAb)saggcaauuCfAfGfucucguuguas(invAb) | | | |
| AC004496 | Fab0016-L20-(NH- | 786 | cPrpusUfsgsUfgUfaugauGfuAfaCfgUfcasg | 503 |
| | C6)s(invAb)scugacguuAfCfAfucauacacaas(invAb) | | | |
| AC004497 | Fab0016-L20-(NH- | 787 | cPrpusCfsasUfgAfucgauGfuAfgUfuCfaasg | 506 |
| | C6)s(invAb)scuugaacuAfCfAfucgaucaugas(invAb) | | | |
| AC004498 | Fab0016-L20-(NH- | 788 | cPrpusAfscsAfaAfgccaaUfaAfaCfaCfcusg | 511 |
| | C6)s(invAb)scagguguuUfAfUfuggcuuuguas(invAb) | | | |
| AC004499 | Fab0016-L20-(NH- | 789 | cPrpusAfscsAfaCfgagacUfgAfaUfuGfccsu | 520 |
| | C6)s(invAb)saggcaauuCfAfGfucucguuguas(invAb) | | | |
| AC004563 | LP293-(NH- | 861 | cPrpasGfsaucaUfucaaCfuUfgCfuccasg | 453 |
| | C6)s(invAb)scuggagcaAfGfUfugaaugaucus(invAb) | | | |
| AC004564 | LP293-(NH- | 859 | cPrpusAfscuaaGfugagUfcUfuGfcaugsg | 454 |
| | C6)s(invAb)sccaugcaaGfAfCfucacuuaguas(invAb) | | | |
| AC004575 | LP293-(NH- | 861 | cPrpasGfsaucaUfucaaCfuUfgCfuccassg | 455 |
| | C6)s(invAb)scuggagcaAfGfUfugaaugaucus(invAb) | | | |
| AC004576 | LP293-(NH- | 859 | cPrpusAfscuaaGfugagUfcUfuGfcaugssg | 456 |
| | C6)s(invAb)sccaugcaaGfAfCfucacuuaguas(invAb) | | | |
| AC004577 | LP293-(NH- | 857 | cPrpusAfscaacGfagacUfgAfaUfugccssu | 457 |
| | C6)s(invAb)saggcaauuCfAfGfucucguuguas(invAb) | | | |
| AC005385 | LP293-(NH- | 790 | cPrpusGfsasCfuCfgaaagCfcUfuCfaUfcasg | 460 |
| | C6)s(invAb)scugaugaaGfGfCfuuucgagucas(invAb) | | | |
| AC005500 | LP293-(NH- | 861 | cPrpasGfsauCfauucaaCfuUfgCfuccassg | 461 |
| | C6)s(invAb)scuggagcaAfGfUfugaaugaucus(invAb) | | | |
| AC005501 | LP293-(NH- | 791 | cPrpusGfsaucaUfucaaCfuUfgCfuccassg | 462 |
| | C6)s(invAb)scuggagcaAfGfUfugaaugaucas(invAb) | | | |
| AC005502 | LP293-(NH- | 861 | cPrpisGfsaucaUfucaaCfuUfgCfuccassg | 463 |
| | C6)s(invAb)scuggagcaAfGfUfugaaugaucus(invAb) | | | |
| AC005503 | LP293-(NH- | 792 | cPrpasGfsaucaUfucaaCfuUfgCfuccassg | 455 |
| | C6)s(invAb)scuggagcaAfgUfugaaugaucus(invAb) | | | |
| AC005504 | LP293-(NH- | 793 | cPrpasGfsaucaUfucaaCfuUfgCfuccassg | 455 |
| | C6)s(invAb)scuggagcaAfgUfUfgaaugaucus(invAb) | | | |
| AC005505 | LP293-(NH- | 861 | cPrpasGfsaucaUUNAucaaCfuUfgCfuccassg | 464 |
| | C6)s(invAb)scuggagcaAfGfUfugaaugaucus(invAb) | | | |
| AC005506 | LP293-(NH- | 861 | cPrpasGfsaucAUNAUfucaaCfuUfgCfuccassg | 465 |
| | C6)s(invAb)scuggagcaAfGfUfugaaugaucus(invAb) | | | |
| AC005507 | LP293-(NH- | 795 | cPrpasGfsaucaUfucaaCfuUfgCfuccassg | 455 |
| | C6)s(invAb)scuggagcaAfGfUfugaaugauuus(invAb) | | | |
| AC005508 | LP293-(NH- | 86 | cPrpasGfsaucaUfucaaUfuUfgCfuccassg | 466 |
| | C6)s(invAb)scuggagcaAfGfUfugaaugaucus(invAb) | | | |
| AC005509 | LP293-(NH- | 86 | cPrpasGfsaucaUfucaaCfuUfgUfuccassg | 467 |
| | C6)s(invAb)scuggagcaAfGfUfugaaugaucus(invAb) | | | |
| AC005510 | LP293-(NH- | 794 | cPrpasGfsaucaUfucaaCfuUfgCfuccassg | 455 |
| | C6)s(invAb)scuggagcaAfgUfuGfaaugaucus(invAb) | | | |
| AC005511 | LP293-(NH- | 857 | cPrpusAfscaAfcgagacUfgAfaUfugccssu | 468 |
| | C6)s(invAb)saggcaauuCfAfGfucucguuguas(invAb) | | | |
| AC005512 | LP293-(NH- | 796 | cPrpusAfscaacGfagacUfgAfaUfugccssu | 457 |
| | C6)s(invAb)saggcaauuCfaGfucucguuguas(invAb) | | | |
| AC005513 | LP293-(NH- | 797 | cPrpusAfscaacGfagacUfgAfaUfugccssu | 457 |
| | C6)s(invAb)saggcaauuCfaGfUfcucguuguas(invAb) | | | |
| AC005514 | LP293-(NH- | 798 | cPrpusAfscaacGfagacUfgAfaUfugccssu | 457 |
| | C6)s(invAb)saggcaauuCfaGfuCfucguuguas(invAb) | | | |
| AC005515 | LP293-(NH- | 857 | cPrpusAfscaacGUNAagacUfgAfaUfugccssu | 469 |
| | C6)s(invAb)saggcaauuCfAfGfucucguuguas(invAb) | | | |
| AC005516 | LP293-(NH- | 857 | cPrpusAfscaaCUNAGfagacUfgAfaUfugccssu | 470 |
| | C6)s(invAb)saggcaauuCfAfGfucucguuguas(invAb) | | | |
| AC005517 | LP293-(NH- | 799 | cPrpusAfscaacGfagacUfgAfaUfugccssu | 457 |
| | C6)s(invAb)saggcaauuCfAfGfucuuguuguas(invAb) | | | |
| AC005518 | LP293-(NH- | 857 | cPrpusAfscaauGfagacUfgAfaUfugccssu | 471 |
| | C6)s(invAb)saggcaauuCfAfGfucucguuguas(invAb) | | | |
| AC005519 | LP293-(NH- | 800 | cPrpusAfscaacGfagacUfgAfaUfugccssu | 457 |
| | C6)s(invAb)sagguaauuCfAfGfucucguuguas(invAb) | | | |
| AC005520 | LP293-(NH- | 801 | cPrpusAfscaacGfagacUfgAfaUfugccssu | 457 |
| | C6)s(invAb)saggcaauuCfAfGfuuucguuguas(invAb) | | | |
| AC005521 | LP293-(NH- | 857 | cPrpussAfcaacGfagacUfgAfaUfugccssu | 472 |
| | C6)s(invAb)saggcaauuCfAfGfucucguuguas(invAb) | | | |
| AC005522 | LP293-(NH- | 859 | cPrpusAfscuAfagugagUfcUfuGfcaugssg | 473 |
| | C6)s(invAb)sccaugcaaGfAfCfucacuuaguas(invAb) | | | |
| AC005523 | LP293-(NH- | 802 | cPrpusAfscuaaGfugagUfcUfuGfcaugssg | 456 |
| | C6)s(invAb)sccaugcaaGfaCfucacuuaguas(invAb) | | | |
| AC005524 | LP293-(NH- | 803 | cPrpusAfscuaaGfugagUfcUfuGfcaugssg | 456 |
| | C6)s(invAb)sccaugcaaGfaCfUfcacuuaguas(invAb) | | | |
| AC005525 | LP293-(NH- | 804 | cPrpusAfscuaaGfugagUfcUfuGfcaugssg | 456 |
| | C6)s(invAb)sccaugcaaGfaCfuCfacuuaguas(invAb) | | | |
| AC005526 | LP293-(NH- | 859 | cPrpusAfscuaaGUNAugagUfcUfuGfcaugssg | 474 |
| | C6)s(invAb)sccaugcaaGfAfCfucacuuaguas(invAb) | | | |
| AC005527 | LP293-(NH- | 859 | cPrpusAfscuaAUNAGfugagUfcUfuGfcaugssg | 475 |
| | C6)s(invAb)sccaugcaaGfAfCfucacuuaguas(invAb) | | | |
| AC005528 | LP293-(NH- | 805 | cPrpusAfscuaaGfugagUfuUfuGfcaugssg | 476 |
| | C6)s(invAb)sccauguaaGfAfCfucacuuaguas(invAb) | | | |
| AC005529 | LP293-(NH- | 806 | cPrpusAfscuaaGfugagUfcUfuGfcaugssg | 456 |
| | C6)s(invAb)sccaugcaaGfAfCfucauuuaguas(invAb) | | | |
| AC005530 | LP293-(NH- | 859 | cPrpusAfscuaaGfugagUfcUfuGfuaugssg | 477 |
| | C6)s(invAb)sccaugcaaGfAfCfucacuuaguas(invAb) | | | |
| AC005531 | LP293-(NH- | 807 | cPrpusAfscuaaGfugagUfcUfuGfcaugssg | 456 |
| | C6)s(invAb)sccaugcaaGfAfCfuuacuuaguas(invAb) | | | |
| AC005532 | LP293-(NH- | 859 | cPrpussAfcuaaGfugagUfcUfuGfcaugssg | 478 |
| | C6)s(invAb)sccaugcaaGfAfCfucacuuaguas(invAb) | | | |
| AC005533 | LP293-(NH- | 861 | cPrpasGfsauuaUfucaaCfuUfgCfuccassg | 479 |
| | C6)s(invAb)scuggagcaAfGfUfugaaugaucus(invAb) | | | |
| AC005956 | Fab0016-L20-(NH- | 786 | cPrpusUfsgsUfgUfaugauGfuAfaCfgUfcasg | 503 |
| | C6)s(invAb)scugacguuAfCfAfucauacacaas(invAb) | | | |
| AC005957 | Fab0016-L20-(NH- | 787 | cPrpusCfsasUfgAfucgauGfuAfgUfuCfaasg | 506 |
| | C6)s(invAb)scuugaacuAfCfAfucgaucaugas(invAb) | | | |
| AC005958 | Fab0016-L20-(NH- | 788 | cPrpusAfscsAfaAfgccaaUfaAfaCfaCfcusg | 511 |
| | C6)s(invAb)scagguguuUfAfUfuggcuuuguas(invAb) | | | |
| AC005959 | Fab0016-L20-(NH- | 789 | cPrpusAfscsAfaCfgagacUfgAfaUfuGfccsu | 520 |
| | C6)s(invAb)saggcaauuCfAfGfucucguuguas(invAb) | | | |
| AC005998 | Fab0016-L20-(NH- | 809 | cPrpusAfscsUfaAfguaacUfuUfgUfgCfugsg | 514 |
| | C6)s(invAb)sccagcacaAfAfGfuuacuuaguas(invAb) | | | |
| AC005999 | Fab0016-L20-(NH- | 810 | cPrpusAfscsUfgAfugaagUfcCfuGfuAfcusg | 519 |
| | C6)s(invAb)scaguacagGfAfCfuucaucaguas(invAb) | | | |
| AC006000 | Fab0016-L20-(NH- | 811 | cPrpusAfscsUfaAfgugagUfcUfuGfcAfugsg | 522 |
| | C6)s(invAb)sccaugcaaGfAfCfucacuuaguas(invAb) | | | |
| AC006001 | Fab0016-L20-(NH- | 812 | cPrpasGfsasUfcAfuucaaCfuUfgCfuCfcasg | 524 |
| | C6)s(invAb)scuggagcaAfGfUfugaaugaucus(invAb) | | | |
| AC006002 | Fab0016-L20-(NH- | 808 | cPrpusGfsasCfuCfgaaggCfcUfuCfaUfcasg | 496 |
| | C6)s(invAb)scugaugaaGfGfCfcuucgagucas(invAb) | | | |
| AC006704 | LP293-(NH- | 794 | cPrpisGfsauCfauucaaCfuUfgCfuccassg | 480 |
| | C6)s(invAb)scuggagcaAfgUfuGfaaugaucus(invAb) | | | |
| AC006705 | LP293-(NH- | 813 | cPrpusGfsauCfauucaaCfuUfgCfuccassg | 481 |
| | C6)s(invAb)scuggagcaAfgUfuGfaaugaucas(invAb) | | | |
| AC006706 | LP293-(NH- | 814 | cPrpusGfsauCfauucaaCfuUfgCfuccassg | 481 |
| | C6)s(invAb)scuggagcaAfgUfuGfaaugauuas(invAb) | | | |
| AC006707 | LP293-(NH- | 798 | cPrpusAfscaAfcgagacUfgAfaUfugccssu | 468 |
| | C6)s(invAb)saggcaauuCfaGfuCfucguuguas(invAb) | | | |
| AC006708 | LP293-(NH- | 800 | cPrpusAfscaAfcgagacUfgAfaUfugccssu | 468 |
| | C6)s(invAb)sagguaauuCfAfGfucucguuguas(invAb) | | | |
| AC006709 | LP293-(NH- | 815 | cPrpusAfscaAfcgagacUfgAfaUfugccssu | 468 |
| | C6)s(invAb)sagguaauuCfaGfuCfucguuguas(invAb) | | | |
| AC006805 | LP293-(NH- | 803 | cPrpusAfscuAfagugagUfcUfuGfcaugssg | 473 |
| | C6)s(invAb)sccaugcaaGfaCfUfcacuuaguas(invAb) | | | |
| AC006806 | LP293-(NH- | 816 | cPrpusAfscuaaGfugagUfcUfuGfcaugssg | 456 |
| | C6)s(invAb)sccaugcaaGfaCfUfuacuuaguas(invAb) | | | |
| AC006807 | LP293-(NH- | 816 | cPrpusAfscuAfagugagUfcUfuGfcaugssg | 473 |
| | C6)s(invAb)sccaugcaaGfaCfUfuacuuaguas(invAb) | | | |
| AC007863 | Fab0070-L20-(NH- | 817 | cPrpusAfscsAfaCfgagacUfgAfaUfuGfccsu | 520 |
| | C6)s(invAb)saggcaauuCfAfGfucucguuguas(invAb) | | | |
| AC007864 | Fab0070-L20-(NH- | 818 | cPrpasGfsasUfcAfuucaaCfuUfgCfuCfcasg | 524 |
| | C6)s(invAb)scuggagcaAfGfUfugaaugaucus(invAb) | | | |
| AC007865 | Fab0070-L20-(NH- | 819 | cPrpusAfscaAfcgagacUfgAfaUfugccssu | 468 |
| | C6)s(invAb)saggcaauuCfaGfuCfucguuguas(invAb) | | | |
| AC007866 | Fab0070-L20-(NH- | 820 | cPrpusGfsauCfauucaaCfuUfgCfuccassg | 481 |
| | C6)s(invAb)scuggagcaAfgUfuGfaaugaucas(invAb) | | | |
| AC007867 | Fab0070-L1026- | 821 | cPrpusAfscaAfcgagacUfgAfaUfugccssu | 468 |
| | C6s(invAb)saggcaauuCfaGfuCfucguuguas(invAb) | | | |
| AC007952 | Fab0070-L1026- | 822 | cPrpusAfscuaaGfugagUfcUfuGfcaugssg | 456 |
| | C6s(invAb)sccaugcaaGfaCfUfcacuuaguas(invAb) | | | |
| AC007953 | Fab0070-L1026- | 823 | cPrpusGfsauCfauucaaCfuUfgCfuccassg | 481 |
| | C6s(invAb)scuggagcaAfgUfuGfaaugaucas(invAb) | | | |
| AC007968 | Fab0070-L1026- | 824 | cPrpusAfscsAfaCfgagacUfgAfaUfuGfccsu | 520 |
| | C6s(invAb)saggcaauuCfAfGfucucguuguas(invAb) | | | |
| AC007969 | Fab0070-L1026- | 825 | cPrpasGfsasUfcAfuucaaCfuUfgCfuCfcasg | 524 |
| | C6s(invAb)scuggagcaAfGfUfugaaugaucus(invAb) | | | |
| AC910139 | LP183s(invAb)saaacagauCfAfUfuggaauuccus(invAb) | 826 | cPrpasGfsgsAfaUfuccaaUfgAfuCfuGfuusu | 482 |
| AC910140 | LP183s(invAb)sugugauuaUfGfUfcugucagaaas(invAb) | 827 | cPrpusUfsusCfuGfacagaCfaUfaAfuCfacsa | 483 |
| AC910577 | LP183s(invAb)saaacagauCfAfUfuggaauuccus(invAb) | 826 | cPrpasGfsgsAfauuccaaUfgAfuCfuguusu | 484 |
| AC910578 | LP183s(invAb)saaacagauCfAfUfuggaauuccus(invAb) | 826 | cPrpasGfsgsaAfuuccaaUfgAfuCfuguusu | 485 |
| AC910579 | LP183s(invAb)saaacagauCfAfUfuggaauuccus(invAb) | 826 | cPrpasGfsgsaauUfccaaUfgAfuCfuguusu | 486 |
| AC910580 | LP183s(invAb)saaacagauCfAfUfuggaauuccus(invAb) | 826 | cPrpasGfsgsaauucCfaaUfgAfuCfuguusu | 487 |
| AC910581 | LP183s(invAb)saaacagauCfAfUfuggaauuccus(invAb) | 826 | cPrpasGfsgsAfaUfuccaaugAfuCfuguusu | 488 |
| AC910582 | LP183s(invAb)saaacagauCfAfUfuggaauuccus(invAb) | 826 | cPrpasGfsgsaauuccaaugAfuCfuguusu | 489 |
| AC910583 | LP183s(invAb)saaacagauCfAfUfuggaauuccus(invAb) | 826 | cPrpasGfsgsaauuccaaUfgAfucuguusu | 490 |
| AC910584 | LP183s(invAb)saaacagauCfAfUfuggaauuccus(invAb) | 826 | cPrpasGfsgsaAfuuccaaugAfucuguusu | 491 |
| AC910585 | LP183s(invAb)saaacagauCfAfUfuggaauuccus(invAb) | 826 | cPrpasGfsgsAfauUUNAccaaUfgAfuCfuguusu | 492 |
| AC911226 | LP293-(NH- | 828 | cPrpusUfsusCfuGfacagaCfaUfaAfuCfacsa | 483 |
| | C6)s(invAb)sugugauuaUfGfUfcugucagaaas(invAb) | | | |
| AC911227 | LP293-(NH- | 829 | cPrpasGfsgsAfaUfuccaaUfgAfuCfuGfuusu | 482 |
| | C6)s(invAb)saaacagauCfAfUfuggaauuccus(invAb) | | | |
| AC911290 | LP293-(NH- | 830 | cPrpusGfsusAfaAfagcagAfaCfcUfgAfgcsg | 493 |
| | C6)s(invAb)scgcucaggUfUfCfugcuuuuacas(invAb) | | | |
| AC911291 | LP293-(NH- | 831 | cPrpusUfscsAfuCfagcuuUfuCfcAfgGfgusc | 494 |
| | C6)s(invAb)sgacccuggAfAfAfagcugaugaas(invAb) | | | |
| AC911292 | LP293-(NH- | 832 | cPrpasGfsgsCfcUfucaucAfgCfuUfuUfccsa | 495 |
| | C6)s(invAb)suggaaaagCfUfGfaugaaggccus(invAb) | | | |
| AC911293 | LP293-(NH- | 833 | cPrpusGfsasCfuCfgaaggCfcUfuCfaUfcasg | 496 |
| | C6)s(invAb)scugaugaaGfGfCfcuucgagucas(invAb) | | | |
| AC911294 | LP293-(NH- | 834 | cPrpusAfscsUfuGfagggaCfuCfgAfaGfgcsc | 497 |
| | C6)s(invAb)sggccuucgAfGfUfcccucaaguas(invAb) | | | |
| AC911295 | LP293-(NH- | 835 | cPrpusGfsasCfuUfgagggAfcUfcGfaAfggsc | 498 |
| | C6)s(invAb)sgccuucgaGfUfCfccucaagucas(invAb) | | | |
| AC911296 | LP293-(NH- | 836 | cPrpasGfsasAfaAfaguucCfaUfaGfcGfausg | 499 |
| | C6)s(invAb)scaucgcuaUfGfGfaacuuuuucus(invAb) | | | |
| AC911297 | LP293-(NH- | 837 | cPrpasAfsgsAfuUfagaauCfcAfuCfaAfagsc | 500 |
| | C6)s(invAb)sgcuuugauGfGfAfuucuaaucuus(invAb) | | | |
| AC911298 | LP293-(NH- | 838 | cPrpusUfsusGfgAfagauuAfgAfaUfcCfausc | 501 |
| | C6)s(invAb)sgauggauuCfUfAfaucuuccaaas(invAb) | | | |
| AC911299 | LP293-(NH- | 839 | cPrpusUfsgsUfcAfuuugcAfaAfaUfuGfccsa | 502 |
| | C6)s(invAb)suggcaauuUfUfGfcaaaugacaas(invAb) | | | |
| AC911300 | LP293-(NH- | 840 | cPrpusUfsgsUfgUfaugauGfuAfaCfgUfcasg | 503 |
| | C6)s(invAb)scugacguuAfCfAfucauacacaas(invAb) | | | |
| AC911301 | LP293-(NH- | 841 | cPrpasCfsasAfcAfuugugGfuCfuUfgGfugsc | 504 |
| | C6)s(invAb)sgcaccaagAfCfCfacaauguugus(invAb) | | | |
| AC911302 | LP293-(NH- | 842 | cPrpusCfsusAfuAfaguucCfaCfaAfuAfcusc | 505 |
| | C6)s(invAb)sgaguauugUfGfGfaacuuauagas(invAb) | | | |
| AC911303 | LP293-(NH- | 843 | cPrpusCfsasUfgAfucgauGfuAfgUfuCfaasg | 506 |
| | C6)s(invAb)scuugaacuAfCfAfucgaucaugas(invAb) | | | |
| AC911304 | LP293-(NH- | 844 | cPrpusAfscsAfaAfgcuucAfcAfgCfaUfccsa | 507 |
| | C6)s(invAb)suggaugcuGfUfGfaagcuuuguas(invAb) | | | |
| AC911305 | LP293-(NH- | 845 | cPrpusAfscsUfuGfuuguaAfcAfgGfaCfcusg | 508 |
| | C6)s(invAb)scagguccuGfUfUfacaacaaguas(invAb) | | | |
| AC911306 | LP293-(NH- | 846 | cPrpusUfsgsAfuGfaggauUfuAfcUfuGfuusg | 509 |
| | C6)s(invAb)scaacaaguAfAfAfuccucaucaas(invAb) | | | |
| AC911307 | LP293-(NH- | 847 | cPrpasCfsasAfaCfaguugCfcAfuCfaUfugsg | 510 |
| | C6)s(invAb)sccaaugauGfGfCfaacuguuugus(invAb) | | | |
| AC911308 | LP293-(NH- | 848 | cPrpusAfscsAfaAfgccaaUfaAfaCfaCfcusg | 511 |
| | C6)s(invAb)scagguguuUfAfUfuggcuuuguas(invAb) | | | |
| AC911309 | LP293-(NH- | 849 | cPrpusAfsusCfuGfucgagAfcAfgUfcGfcusu | 512 |
| | C6)s(invAb)saagcgacuGfUfCfucgacagauas(invAb) | | | |
| AC911310 | LP293-(NH- | 850 | cPrpusAfsgsUfuGfaacagUfgCfuCfaCfggsa | 513 |
| | C6)s(invAb)succgugagCfAfCfuguucaacuas(invAb) | | | |
| AC911311 | LP293-(NH- | 851 | cPrpusAfscsUfaAfguaacUfuUfgUfgCfugsg | 514 |
| | C6)s(invAb)sccagcacaAfAfGfuuacuuaguas(invAb) | | | |
| AC911312 | LP293-(NH- | 852 | cPrpusCfsasCfaUfuccaaGfuUfuGfgCfugsc | 515 |
| | C6)s(invAb)sgcagccaaAfCfUfuggaaugugas(invAb) | | | |
| AC911313 | LP293-(NH- | 853 | cPrpusGfsusAfcUfauuucUfcUfaUfuGfcasc | 516 |
| | C6)s(invAb)sgugcaauaGfAfGfaaauaguacas(invAb) | | | |
| AC911314 | LP293-(NH- | 854 | cPrpusAfsgsUfcAfuggagGfuUfcUfgAfcasg | 517 |
| | C6)s(invAb)scugucagaAfCfCfuccaugacuas(invAb) | | | |
| AC911315 | LP293-(NH- | 855 | cPrpusGfsasAfuGfugauuUfaCfaAfuGfagsc | 518 |
| | C6)s(invAb)sgcucauugUfAfAfaucacauucas(invAb) | | | |
| AC911316 | LP293-(NH- | 856 | cPrpusAfscsUfgAfugaagUfcCfuGfuAfcusg | 519 |
| | C6)s(invAb)scaguacagGfAfCfuucaucaguas(invAb) | | | |
| AC911317 | LP293-(NH- | 857 | cPrpusAfscsAfaCfgagacUfgAfaUfuGfccsu | 520 |
| | C6)s(invAb)saggcaauuCfAfGfucucguuguas(invAb) | | | |
| AC911318 | LP293-(NH- | 858 | cPrpusUfsgsAfgUfucuucCfaUfuGfgCfaasc | 521 |
| | C6)s(invAb)sguugccaaUfGfGfaagaacucaas(invAb) | | | |
| AC911319 | LP293-(NH- | 859 | cPrpusAfscsUfaAfgugagUfcUfuGfcAfugsg | 522 |
| | C6)s(invAb)sccaugcaaGfAfCfucacuuaguas(invAb) | | | |
| AC911320 | LP293-(NH- | 860 | cPrpusCfsasGfaAfauuucAfcUfcAfuCfccsu | 523 |
| | C6)s(invAb)sagggaugaGfUfGfaaauuucugas(invAb) | | | |
| AC911321 | LP293-(NH- | 861 | cPrpasGfsasUfcAfuucaaCfuUfgCfuCfcasg | 524 |
| | C6)s(invAb)scuggagcaAfGfUfugaaugaucus(invAb) | | | |
| AC911599 | LP293-(NH- | 862 | cPrpusCfsasUfcAfgcuuuUfcCfaGfgGfucsg | 525 |
| | C6)s(invAb)scgacccugGfAfAfaagcuiaugas(invAb) | | | |
| AC911600 | LP293-(NH- | 863 | cPrpusAfscsUfcGfaaggcCfuUfcAfuCfagsc | 526 |
| | C6)s(invAb)sgcugaugaAfGfGfccuuciaguas(invAb) | | | |
| AC911601 | LP293-(NH- | 864 | cPrpusUfsusUfcUfuugguCfgGfuGfcAfgcsg | 527 |
| | C6)s(invAb)scgcugcacCfGfAfccaaagaaaas(invAb) | | | |
| AC911602 | LP293-(NH- | 865 | cPrpusCfsusUfuCfuuuggUfcGfgUfgCfagsc | 528 |
| | C6)s(invAb)sgcugcaccGfAfCfcaaagaaagas(invAb) | | | |
| AC911603 | LP293-(NH- | 866 | cPrpusUfscsUfuUfcuuugGfuCfgGfuGfcasg | 529 |
| | C6)s(invAb)scugcaccgAfCfCfaaagaaagaas(invAb) | | | |
| AC911758 | LP293-(NH- | 833 | cPrpusGfsascUfcgaaggCfcUfuCfaucasg | 530 |
| | C6)s(invAb)scugaugaaGfGfCfcuucgagucas(invAb) | | | |
| AC911759 | LP293-(NH- | 833 | cPrpusGfsascucGfaaggCfcUfuCfaucasg | 531 |
| | C6)s(invAb)scugaugaaGfGfCfcuucgagucas(invAb) | | | |
| AC911760 | LP293-(NH- | 833 | cPrpusGfsascucgaAfggCfcUfuCfaucasg | 532 |
| | C6)s(invAb)scugaugaaGfGfCfcuucgagucas(invAb) | | | |
| AC911761 | LP293-(NH- | 833 | cPrpusGfsacucGfaaggCfcUfuCfaucasg | 533 |
| | C6)s(invAb)scugaugaaGfGfCfcuucgagucas(invAb) | | | |
| AC911762 | LP293-(NH- | 867 | cPrpusGfsascucGfaaggCfcUfuCfaucasg | 531 |
| | C6)s(invAb)scugaugaaGfgCfcuucgagucas(invAb) | | | |
| AC911763 | LP293-(NH- | 868 | cPrpusGfsascucGfaaggCfcUfuCfaucasg | 531 |
| | C6)s(invAb)scugaugAfaGfgCfcuucgagucas(invAb) | | | |
| AC911764 | LP293-(NH- | 869 | cPrpusGfsascucGfaaggCfcUfuCfaucasg | 531 |
| | C6)s(invAb)scugaugaaGfgCfCfuucgagucas(invAb) | | | |
| AC911765 | LP293-(NH- | 833 | cPrpusGfsascucGfaaggccUfucaucasg | 534 |
| | C6)s(invAb)scugaugaaGfGfCfcuucgagucas(invAb) | | | |
| AC911766 | LP293-(NH- | 833 | cPrpusGfsascucgaAfggccUfucaucasg | 535 |
| | C6)s(invAb)scugaugaaGfGfCfcuucgagucas(invAb) | | | |
| AC911767 | LP293-(NH- | 833 | cPrpusGfsascucGfaaggccUfucaucAfsg | 536 |
| | C6)s(invAb)scugaugaaGfGfCfcuucgagucas(invAb) | | | |
| AC912419 | LP293-(NH- | 843 | cPrpusCfsasuGfaucgauGfuAfgUfucaasg | 537 |
| | C6)s(invAb)scuugaacuAfCfAfucgaucaugas(invAb) | | | |
| AC912420 | LP293-(NH- | 843 | cPrpusCfsasugaUfcgauGfuAfgUfucaasg | 538 |
| | C6)s(invAb)scuugaacuAfCfAfucgaucaugas(invAb) | | | |
| AC912421 | LP293-(NH- | 843 | cPrpusCfsaugaUfcgauGfuAfgUfucaasg | 539 |
| | C6)s(invAb)scuugaacuAfCfAfucgaucaugas(invAb) | | | |
| AC912422 | LP293-(NH- | 843 | cPrpusCfsaugaUfcgauGfuAfgUfucaassg | 540 |
| | C6)s(invAb)scuugaacuAfCfAfucgaucaugas(invAb) | | | |
| AC912423 | LP293-(NH- | 843 | cPrpussCfsaugaUfcgauGfuAfgUfucaassg | 541 |
| | C6)s(invAb)scuugaacuAfCfAfucgaucaugas(invAb) | | | |
| AC912424 | LP293-(NH- | 870 | cPrpusCfsaugaUfcgauGfuAfgUfucaasg | 539 |
| | C6)s(invAb)scuugaacuAfcAfucgaucaugas(invAb) | | | |
| AC912425 | LP293-(NH- | 871 | cPrpusCfsaugaUfcgauGfuAfgUfucaasg | 539 |
| | C6)s(invAb)scuugaaCfuAfcAfucgaucaugas(invAb) | | | |
| AC912426 | LP293-(NH- | 872 | cPrpusCfsaugaUfcgauGfuAfgUfucaasg | 539 |
| | C6)s(invAb)scuugaacuAfcAfUfcgaucaugas(invAb) | | | |
| AC912427 | LP293-(NH- | 843 | cPrpusCfsaugaUfcgauguAfguucaAfsg | 542 |
| | C6)s(invAb)scuugaacuAfCfAfucgaucaugas(invAb) | | | |
| AC912428 | LP293-(NH- | 843 | cPrpusdCsaugadTcgaudGuAfgdUucaasg | 543 |
| | C6)s(invAb)scuugaacuAfCfAfucgaucaugas(invAb) | | | |
| AC912429 | LP293-(NH- | 843 | cPrpusCfsaugadTcgaudGuAfgdUucaasg | 544 |
| | C6)s(invAb)scuugaacuAfCfAfucgaucaugas(invAb) | | | |
| AC912430 | LP293-(NH- | 843 | cPrpusCfsaugadTcgauGfuAfgdUucaasg | 545 |
| | C6)s(invAb)scuugaacuAfCfAfucgaucaugas(invAb) | | | |
| AC912431 | LP293-(NH- | 840 | cPrpusUfsgsuguAfugauGfuAfaCfgucasg | 546 |
| | C6)s(invAb)scugacguuAfCfAfucauacacaas(invAb) | | | |
| AC912432 | LP293-(NH- | 840 | cPrpusUfsgsuGfuaugauGfuAfaCfgucasg | 547 |
| | C6)s(invAb)scugacguuAfCfAfucauacacaas(invAb) | | | |
| AC912433 | LP293-(NH- | 840 | cPrpusUfsguguAfugauGfuAfaCfgucasg | 548 |
| | C6)s(invAb)scugacguuAfCfAfucauacacaas(invAb) | | | |
| AC912434 | LP293-(NH- | 840 | cPrpusUfsguguAfugauGfuAfaCfgucassg | 549 |
| | C6)s(invAb)scugacguuAfCfAfucauacacaas(invAb) | | | |
| AC912435 | LP293-(NH- | 840 | cPrpussUfsguguAfugauGfuAfaCfgucassg | 550 |
| | C6)s(invAb)scugacguuAfCfAfucauacacaas(invAb) | | | |
| AC912436 | LP293-(NH- | 873 | cPrpusUfsguguAfugauGfuAfaCfgucasg | 548 |
| | C6)s(invAb)scugacguuAfcAfucauacacaas(invAb) | | | |
| AC912437 | LP293-(NH- | 874 | cPrpusUfsguguAfugauGfuAfaCfgucasg | 548 |
| | C6)s(invAb)scugacgUfuAfcAfucauacacaas(invAb) | | | |
| AC912438 | LP293-(NH- | 875 | cPrpusUfsguguAfugauGfuAfaCfgucasg | 548 |
| | C6)s(invAb)scugacguuAfcAfUfcauacacaas(invAb) | | | |
| AC912439 | LP293-(NH- | 840 | cPrpusUfsguguAfugauguAfacgucAfsg | 551 |
| | C6)s(invAb)scugacguuAfCfAfucauacacaas(invAb) | | | |
| AC912440 | LP293-(NH- | 840 | cPrpusdTsgugudAugaudGuAfadCgucasg | 552 |
| | C6)s(invAb)scugacguuAfCfAfucauacacaas(invAb) | | | |
| AC912441 | LP293-(NH- | 840 | cPrpusUfsgugudAugaudGuAfadCgucasg | 553 |
| | C6)s(invAb)scugacguuAfCfAfucauacacaas(invAb) | | | |
| AC912442 | LP293-(NH- | 840 | cPrpusUfsgugudAugauGfuAfadCgucasg | 554 |
| | C6)s(invAb)scugacguuAfCfAfucauacacaas(invAb) | | | |
| AC912443 | LP293-(NH- | 848 | cPrpusAfscsaAfagccaaUfaAfaCfaccusg | 555 |
| | C6)s(invAb)scagguguuUfAfUfuggcuuuguas(invAb) | | | |
| AC912444 | LP293-(NH- | 848 | cPrpusAfscsaaaGfccaaUfaAfaCfaccusg | 556 |
| | C6)s(invAb)scagguguuUfAfUfuggcuuuguas(invAb) | | | |
| AC912445 | LP293-(NH- | 848 | cPrpusAfscaaaGfccaaUfaAfaCfaccusg | 557 |
| | C6)s(invAb)scagguguuUfAfUfuggcuuuguas(invAb) | | | |
| AC912446 | LP293-(NH- | 848 | cPrpusAfscaaaGfccaaUfaAfaCfaccussg | 558 |
| | C6)s(invAb)scagguguuUfAfUfuggcuuuguas(invAb) | | | |
| AC912447 | LP293-(NH- | 848 | cPrpussAfscaaaGfccaaUfaAfaCfaccussg | 559 |
| | C6)s(invAb)scagguguuUfAfUfuggcuuuguas(invAb) | | | |
| AC912448 | LP293-(NH- | 876 | cPrpusAfscaaaGfccaaUfaAfaCfaccusg | 557 |
| | C6)s(invAb)scagguguuUfaUfuggcuuuguas(invAb) | | | |
| AC912449 | LP293-(NH- | 877 | cPrpusAfscaaaGfccaaUfaAfaCfaccusg | 557 |
| | C6)s(invAb)scaggugUfuUfaUfuggcuuuguas(invAb) | | | |
| AC912450 | LP293-(NH- | 878 | cPrpusAfscaaaGfccaaUfaAfaCfaccusg | 557 |
| | C6)s(invAb)scagguguuUfaUfUfggcuuuguas(invAb) | | | |
| AC912451 | LP293-(NH- | 848 | cPrpusAfscaaaGfccaauaAfacaccUfsg | 560 |
| | C6)s(invAb)scagguguuUfAfUfuggcuuuguas(invAb) | | | |
| AC912452 | LP293-(NH- | 848 | cPrpusdAscaaadGccaadTaAfadCaccusg | 561 |
| | C6)s(invAb)scagguguuUfAfUfuggcuuuguas(invAb) | | | |
| AC912453 | LP293-(NH- | 848 | cPrpusAfscaaadGccaadTaAfadCaccusg | 562 |
| | C6)s(invAb)scagguguuUfAfUfuggcuuuguas(invAb) | | | |
| AC912454 | LP293-(NH- | 848 | cPrpusAfscaaadGccaaUfaAfadCaccusg | 563 |
| | C6)s(invAb)scagguguuUfAfUfuggcuuuguas(invAb) | | | |

[0175] In some embodiments, an HTT RNAi agent is prepared or provided as a salt, mixed salt, or a free-acid. In some embodiments, an HTT RNAi agent is prepared or provided as a pharmaceutically acceptable salt. In some embodiments, an HTT RNAi agent is prepared or provided as a pharmaceutically acceptable sodium or potassium salt. The RNAi agents described herein, upon delivery to a cell expressing an HTT gene, inhibit or knockdown expression of one or more HTT genes in vivo and/or in vitro.

### Targeting Groups, Linking Groups, PK/PD Modulators and Delivery Vehicles

[0176] In some embodiments, an HTT RNAi agent contains or is conjugated to one or more non-nucleotide groups including, but not limited to, a targeting group, a linking group, a delivery polymer, or a delivery vehicle. The non-nucleotide group can enhance targeting, delivery, or attachment of the RNAi agent. The non-nucleotide group can be covalently linked to the 3′ and/or 5′ end of either the sense strand and/or the antisense strand. In some embodiments, an HTT RNAi agent contains a non-nucleotide group linked to the 3′ and/or 5′ end of the sense strand. In some embodiments, a non-nucleotide group is linked to the 5′ end of an HTT RNAi agent sense strand. A non-nucleotide group can be linked directly or indirectly to the RNAi agent via a linker/linking group. In some embodiments, a non-nucleotide group is linked to the RNAi agent via a labile, cleavable, or reversible bond or linker.

[0177] In some embodiments, a non-nucleotide group enhances the pharmacokinetic or biodistribution properties of an RNAi agent or conjugate to which it is attached to improve cell- or tissue-specific distribution and cell-specific uptake of the conjugate. In some embodiments, a non-nucleotide group enhances endocytosis of the RNAi agent.

[0178] Targeting groups or targeting moieties enhance the pharmacokinetic or biodistribution properties of a conjugate or RNAi agent to which they are attached to improve cell-specific (including, in some cases, organ specific) distribution and cell-specific (or organ specific) uptake of the conjugate or RNAi agent. A targeting group can be monovalent, divalent, trivalent, tetravalent, or have higher valency for the target to which it is directed. Representative targeting groups include, without limitation, compounds with affinity to cell surface molecule, cell receptor ligands, hapten, antibodies, monoclonal antibodies, antibody fragments, and antibody mimics with affinity to cell surface molecules. In some embodiments, a targeting group is linked to an RNAi agent using a linker, such as a PEG linker or one, two, or three abasic and/or ribitol (abasic ribose) residues, which in some instances can serve as linkers.

[0179] A targeting group, with or without a linker, can be attached to the 5′ or 3′ end of any of the sense and/or antisense strands disclosed in Tables 2, 3, 4, 5, 6, and 9. A linker, with or without a targeting group, can be attached to the 5′ or 3′ end of any of the sense and/or antisense strands disclosed in Tables 2, 3, 4, 5, 6, and 9.

[0180] The HTT RNAi agents described herein can be synthesized having a reactive group, such as an amino group (also referred to herein as an amine), at the 5′-terminus and/or the 3′-terminus. The reactive group can be used subsequently to attach a targeting moiety using methods typical in the art.

[0181] For example, in some embodiments, the HTT RNAi agents disclosed herein are synthesized having an NH₂-C₆ group at the 5′-terminus of the sense strand of the RNAi agent. The terminal amino group subsequently can be reacted to form a conjugate with, for example, a group that includes an antigen binding protein. In some embodiments, the HTT RNAi agents disclosed herein are synthesized having one or more alkyne groups at the 5′-terminus of the sense strand of the RNAi agent.

[0182] In some embodiments, targeting groups are linked to the HTT RNAi agents without the use of an additional linker. In some embodiments, the targeting group is designed having a linker readily present to facilitate the linkage to an HTT RNAi agent. In some embodiments, when two or more RNAi agents are included in a composition, the two or more RNAi agents can be linked to their respective targeting groups using the same linkers. In some embodiments, when two or more RNAi agents are included in a composition, the two or more RNAi agents are linked to their respective targeting groups using different linkers.

[0183] In some embodiments, a linking group is conjugated to the RNAi agent. The linking group facilitates covalent linkage of the agent to a targeting group, pharmacokinetic modulator, delivery polymer, or delivery vehicle. The linking group can be linked to the 3′ and/or the 5′ end of the RNAi agent sense strand or antisense strand. In some embodiments, the linking group is linked to the RNAi agent sense strand. In some embodiments, the linking group is conjugated to the 5′ or 3′ end of an RNAi agent sense strand. In some embodiments, a linking group is conjugated to the 5′ end of an RNAi agent sense strand. Examples of linking groups, include but are not limited to: C6-SS-C6, 6-SS-6, reactive groups such a primary amines (e.g., NH2-C6) and alkynes, alkyl groups, abasic residues/nucleotides, amino acids, tri-alkyne functionalized groups, ribitol, and/or PEG groups. Examples of certain linking groups are provided in Table 10.

[0184] A linker or linking group is a connection between two atoms that links one chemical group (such as an RNAi agent) or segment of interest to another chemical group (such as a targeting group, pharmacokinetic modulator, or delivery polymer) or segment of interest via one or more covalent bonds. A labile linkage contains a labile bond. A linkage can optionally include a spacer that increases the distance between the two joined atoms. A spacer may further add flexibility and/or length to the linkage. Spacers include, but are not to be limited to, alkyl groups, alkenyl groups, alkynyl groups, aryl groups, aralkyl groups, aralkenyl groups, and aralkynyl groups; each of which can contain one or more heteroatoms, heterocycles, amino acids, nucleotides, and saccharides. Spacer groups are well known in the art and the preceding list is not meant to limit the scope of the description. In some embodiments, an HTT RNAi agent is conjugated to a polyethylene glycol (PEG) moiety, or to a hydrophobic group having 12 or more carbon atoms, such as a cholesterol or palmitoyl group.

[0185] In some embodiments, an HTT RNAi agent is linked to one or more antigen binding proteins. Antigen binding proteins may enhance the bioavailability of the RNAi agent, the delivery of the RNAi agent to a cell of interest, or the facilitation of shuttling the RNAi agent across the blood brain barrier. In some embodiments, the antigen binding protein may be conjugated to a linker at the 3′ or 5′ end of a sense strand or an antisense strand of an RNAi agent described herein. In some embodiments, an antigen binding protein may be linked at both the 3′ or 5′ end of either the sense strand or the antisense strand of an RNAi agent described herein.

[0186] In some embodiments, an antigen binding protein may be conjugated to an HTT RNAi agent by reacting an HTT RNAi agent comprising an amine-comprising linker, for example, (NH2-C6) (see Table 10). In some embodiments, the amine-comprising linker may be located on the 5′ end of the sense strand or the antisense strand of an HTT RNAi agent. In some embodiments, the amine-comprising linker may be located on the 3′ end of the sense strand or the antisense strand of an RNAi agent.

[0187] Any of the HTT RNAi agent nucleotide sequences listed in Tables 2, 3, 4, 5, 6, and 9, whether modified or unmodified, can contain 3′ and/or 5′ targeting group(s), linking group(s), and/or antigen binding fragments. Any of the HTT RNAi agent duplexes listed in Tables 7, 8, and 9, whether modified or unmodified, can further comprise a targeting group or linking group, but not limited to, those depicted in Table 10, and the targeting group or linking group can be attached to the 3′ or 5′ terminus of either the sense strand or the antisense strand of the HTT RNAi agent duplex.

[0188] In some embodiments, an HTT RNAi agent is linked to one or more lipid PK/PD moieties (referred to herein as “lipid moieties” or “PK/PD modulators”.) Lipid PK/PD moieties may enhance the pharmacodynamic or pharmacokinetic properties of the RNAi agent. In some embodiments, the lipid moiety may be conjugated to a linker at the 3′ or 5′ end of a sense strand or an antisense strand of an RNAi agent described herein. In some embodiments, a lipid moiety may be linked at both the 3′ or 5′ end of either the sense strand or the antisense strand of an RNAi agent described herein.

[0189] In some embodiments, a lipid moiety may be conjugated to an HTT RNAi agent by reacting an HTT RNAi agent comprising an amine-comprising linker, for example, (NH2-C6) (see Table 10). In some embodiments, the amine-comprising linker may be located on the 5′ end of the sense strand or the antisense strand of an HTT RNAi agent. In some embodiments, the amine-comprising linker may be located on the 3′ end of the sense strand or the antisense strand of an RNAi agent.

[0190] In some embodiments, an RNAi agent comprising an amine-comprising linker, such as (NH2-C6) or (NH2-C6)s, may be reacted with a lipid comprising an activated ester moiety. Example lipids with activated ester moieties include LP-183-p and LP293-p as shown in Table 10 below.

[0191] In some embodiments, an HTT RNAi agent may be conjugated to a lipid moiety using phosphoramidite synthesis. Synthesizing oligonucleotides using phosphoramidites is well-known in the art. In some embodiments, a lipid moiety may be conjugated to the 5′ end of the sense strand or the antisense strand of an HTT RNAi agent using a phosphoramidite. In some embodiments, a lipid moiety may be conjugated to the 3′ end of the sense strand or the antisense strand of an HTT RNAi agent using a phosphoramidite. In some embodiments, a phosphoramidite such as LP-183 phosphoramidite, shown in Table 10 below, may be used to conjugate a lipid moiety to an HTT RNAi agent.

[0192] In some embodiments, HTT RNAi agents may comprise a lipid moiety on an internal nucleotide (i.e., not on the 3′ or 5′ terminal nucleotides.) In some embodiments, an internal nucleotide may be linked to the 2′ position of ribose.

[0193] Examples of certain modified nucleotides, capping moieties, PK/PD modulators and linking groups are provided in Table 10.

TABLE 10

[chemical structure]

[chemical structure]

cPrpu

[chemical structure]

cPrpus

[chemical structure]

cPrpa

[chemical structure]

cPrpas

[chemical structure]

a_2N

[chemical structure]

a_2Ns
When positioned internally:

[chemical structure]

When positioned at the 3′ terminal end:

[chemical structure]

(invAb)
When position at the 3′ terminal end:

[chemical structure]

(C6-SS-C6)
When positioned internally:

[chemical structure]

(C6-SS-C6)
When position at the 3′ terminal end:

[chemical structure]

(6-SS-6)
When positioned internally:

[chemical structure]

(6-SS-6)

[chemical structure]

(NH2-C6)

[chemical structure]

(NH2-C6)s

[chemical structure]

(NH-C6)

[chemical structure]

(NH-C6)s

[chemical structure]

L20

[chemical structure]

L20-p

[chemical structure]

(L1026)

[chemical structure]

L1026-p

[chemical structure]

[CP-1113]

[chemical structure]

CP-1113-p

[chemical structure]

LP293

[chemical structure]

LP293-p

[chemical structure]

LP183 phosphoramidite

[chemical structure]

LP183

[chemical structure]

LP-183-p (commerically available)

[0194] Alternatively, other linking groups known in the art may be used. In many instances, linking groups can be commercially acquired or alternatively, are incorporated into commercially available nucleotide phosphoramidites. (See, e.g., International Patent Application Publication No. WO 2019/161213, which is incorporated herein by reference in its entirety).

[0195] In some embodiments, an HTT RNAi agent is delivered without being conjugated to an antigen binding protein or other targeting group (referred to as being “naked” or a “naked RNAi agent”).

[0196] In some embodiments, an HTT RNAi agent is conjugated to a targeting group, a linking group, a PK modulator, and/or another non-nucleotide group to facilitate delivery of the HTT RNAi agent to the cell or tissue of choice, for example, to a CNS cell in vivo. In some embodiments, an HTT RNAi agent is conjugated to an antigen binding protein.

[0197] In some embodiments, a delivery vehicle may be used to deliver an RNAi agent to a cell or tissue. A delivery vehicle is a compound that improves delivery of the RNAi agent to a cell or tissue. A delivery vehicle can include, or consist of, but is not limited to: a polymer, such as an amphipathic polymer, a membrane active polymer, a peptide, a melittin peptide, a melittin-like peptide (MLP), a lipid, a reversibly modified polymer or peptide, or a reversibly modified membrane active polyamine.

[0198] In some embodiments, the RNAi agents can be combined with lipids, nanoparticles, polymers, liposomes, micelles, DPCs or other delivery systems available in the art for nucleic acid delivery. The RNAi agents can also be chemically conjugated to targeting groups, lipids (including, but not limited to cholesteryl and cholesteryl derivatives), encapsulating in nanoparticles, liposomes, micelles, conjugating to polymers or DPCs (see, for example WO 2000/053722, WO 2008/022309, WO 2011/104169, and WO 2012/083185, WO 2013/032829, WO 2013/158141, each of which is incorporated herein by reference), by iontophoresis, or by incorporation into other delivery vehicles or systems available in the art such as hydrogels, cyclodextrins, biodegradable nanocapsules, bioadhesive microspheres, or proteinaceous vectors. In some embodiments the RNAi agents can be conjugated to antibodies having affinity for CNS cells. In some embodiments, the RNAi agents can be linked to targeting ligands that have affinity for CNS cells or receptors present on CNS cells.

### Antigen Binding Proteins

[0199] In one aspect, HTT RNAi agents are conjugates to antigen binding proteins. In some embodiments, the antigen binding protein may be selected from the group consisting of: an antibody, an antibody fragment (e.g., an antigen binding fragment, or Fab), scFv, or other functional component or derivative of an antibody encompassing a Fab and/or complementary-determining regions (CDRs) disclosed herein.

[0200] In some embodiments, the antigen binding protein may act as a shuttle to facilitate the crossing of the blood brain barrier (BBB) of the RNAi agent, such that the RNAi agent may be administered subcutaneously and reach CNS tissue. In some embodiments, the antigen binding protein is an anti-Transferrin 1 (TfR1) antibody or Fab.

[0201] In some embodiments, the antigen binding protein is a Fab. In some embodiments, the Fab comprises (i) 6 complementary determining regions (CDRs), (ii) 3 CDRs on the variable light chain (VL), or (iii) 3 CDRs on the variable heavy chain (VH).

[0202] In some embodiments, the Fab comprises a light chain and a heavy chain. In some embodiments, the light chain comprises a variable light chain (VL) and a light constant chain 1 (CL). In some embodiments, the VL comprises three CDRs. In some embodiments, the VL comprises a VL CDR1, a VL CDR2, and a VL CDR3. In some embodiments, the heavy chain comprises a variable heavy chain (VH) and a heavy constant chain 1 (CH). In some embodiments, the VH comprises three CDRs. In some embodiments, the VH comprises a VH CDR1, a VH CDR2, and a VH CDR3.

[0203] In some embodiments, the light constant chain 1 (CL) comprises or consists of the sequence: RTVAAPSVFIFPPSDEQLKSGTASVVCLLNNFYPREAKVQWKVDNALQSGNSQESVT EQDSKDSTYSLSSTLTLSKADYEKHKVYACEVTHQGLSSPVTKSFNRGEC (SEQ ID NO: 2). In some embodiments, the light chain comprises or consists of the sequence:

(SEQ ID NO: 3)
DIQLTQSPSSLSASVGDRVTITCRASDKLYSNLAWYQQKPGKAPKL
LIYDATLLASGVPSRFSGSGSGTDYTLTISSLQPEDFATYYCQHFW
GTPLTFGQGTKVEIKRTVAAPSVFIFPPSDEQLKSGTASVVCLLNN
FYPREAKVQWKVDNALQSGNSQESVTEQDSKDSTYSLSSTLTLSKA
DYEKHKVYACEVTHQGLSSPVTKSFNRGEC.

[0204] In some embodiments, the heavy constant chain 1 (CH) comprises or consists of the sequence:

(SEQ ID NO: 5)
EVQLVESGGGLVQPGGSLRLSCATSGFTFTSYWMHWVRQAPGKGLE
WVAEINPTNGRTNYIEKFKSRITLSVDKSKSTVYLQMNSLRAEDTA
VYYCARGTRAYHYWGQGTLVTVSSASTKGPSVFPLAPSSKSTSGGT
AALGCLVKDYFPEPVTVSWNSGALTSGVHTFPAVLQSSGLYSLSSV
VTVPSSSLGTQTYICNVNHKPSNTKVDKRVEPKSCDKTH.

[0205] In some embodiments, the antigen binding protein may have a VL CDR1 sequence selected from the group consisting of: RASDGLYSNLA (SEQ ID NO: 6), RASDNLYRNLA (SEQ ID NO: 7), and RASDKLYSNLA (SEQ ID NO: 8).

[0206] In some embodiments, the antigen binding protein may have a VL CDR2 sequence selected from the group consisting of: DATLLAS (SEQ ID NO: 9), DARNLAS (SEQ ID NO: 10), DAFNLAS (SEQ ID NO: 11), DATRLAS (SEQ ID NO: 12), DATKLAS (SEQ ID NO: 13), and DAKNLAS (SEQ ID NO: 14).

[0207] In some embodiments, the antigen binding protein may have a VL CDR 3 sequence of QHFWGTPLT (SEQ ID NO: 15).

[0208] In some embodiments, the antigen binding protein may have a VH CDR1 sequence selected from the group consisting of: GYTFNSYWMH (SEQ ID NO: 16), GYTFKSYWMH (SEQ ID NO: 17), GFTFTSYWMH (SEQ ID NO: 18), GYTFTSYWVH (SEQ ID NO: 19), and GYTFTSYWMH (SEQ ID NO: 20).

[0209] In some embodiments, the antigen binding protein may have a VH CDR2 sequence selected from the group consisting of: EINPTNGRVNYIEKFKS (SEQ ID NO: 21), EINPTNGRFNYIEKFKS (SEQ ID NO: 22), EINPTNGRTNYIEKFKS (SEQ ID NO: 23), and EINPTNGRSNYIEKFKS (SEQ ID NO: 24).

[0210] In some embodiments, the antigen binding protein may have a VH CDR3 sequence of: GTRAYHY (SEQ ID NO: 25).

[0211] In some embodiments, the antigen binding protein may have a VL CDR1 sequence of RASDKLYSNLA (SEQ ID NO: 8), a VL CDR2 sequence of DATLLAS (SEQ ID NO: 9), and a VL CDR 3 sequence of QHFWGTPLT (SEQ ID NO: 15).

[0212] In some embodiments, the antigen binding protein may have a VH CDR1 sequence of GFTFTSYWMH (SEQ ID NO: 18), a VH CDR2 sequence of EINPTNGRTNYIEKFKS (SEQ ID NO: 23), and a VH CDR 3 sequence of GTRAYHY (SEQ ID NO: 25).

[0213] In some embodiments, the antigen binding protein may have a VL CDR1 sequence of RASDKLYSNLA (SEQ ID NO: 8), a VL CDR2 sequence of DATLLAS (SEQ ID NO: 9), a VL CDR 3 sequence of QHFWGTPLT (SEQ ID NO: 15), a VH CDR1 sequence of GFTFTSYWMH (SEQ ID NO: 18), a VH CDR2 sequence of EINPTNGRTNYIEKFKS (SEQ ID NO: 23), and a VH CDR 3 sequence of GTRAYHY (SEQ ID NO: 25).

[0214] In some embodiments, the VL comprises a sequence of any one of the sequences listed in Table A. Each of the Fabs described in Table A may have a light chain constant region that comprises or consists of the sequence:

(SEQ ID NO: 2)
RTVAAPSVFIFPPSDEQLKSGTASVVCLLNNFYPREAKVQWKVDNALQSG
NSQESVTEQDSKDSTYSLSSTLTLSKADYEKHKVYACEVTHQGLSSPVTK
SFNRGEC.

[0215] In some embodiments, the antigen binding protein may have a VL sequence of:

(SEQ ID NO: 32)
DIQLTQSPSSLSASVGDRVTITCRASDKLYSNLAWYQQKPGKAPKLLIYD
ATLLASGVPSRFSGSGSGTDYTLTISSLQPEDFATYYCQHFWGTPLTFGQ
GTKVEIK.

[0216] In some embodiments, the antigen binding protein may have a VH sequence of:

(SEQ ID NO: 40)
EVQLVESGGGLVQPGGSLRLSCATSGFTFTSYWMHWVRQAPGKGLEWVAE
INPTNGRTNYIEKFKSRITLSVDKSKSTVYLQMNSLRAEDTAVYYCARGT
RAYHYWGQGTLVTVSS.

[0217] In some embodiments, the antigen binding protein may have a VL sequence of: DIQLTQSPSSLSASVGDRVTITCRASDKLYSNLAWYQQKPGKAPKLLIYDATLLASG VPSRFSGSGSGTDYTLTISSLQPEDFATYYCQHFWGTPLTFGQGTKVEIK (SEQ ID NO: 32) and a VH sequence of:

(SEQ ID NO: 40)
EVQLVESGGGLVQPGGSLRLSCATSGFTFTSYWMHWVRQAPGKGLEWVAE
INPTNGRTNYIEKFKSRITLSVDKSKSTVYLQMNSLRAEDTAVYYCARGT
RAYHYWGQGTLVTVSS.

TABLE A
VL chains with CDR mutation combinations in bold.

| SEQ | | |
|---|---|---|
| ID | | |
| NO. | Fab | VL SEQUENCE |
| 26 | Fab0002 | DIQMTQSPSSLSASVGDRVTITCRASDNLYSNLAWYQQKPGKSP |
| | | KLLVYDATNLADGVPSRFSGSGSGTDYTLTISSLQPEDFATYYC |
| | | QHFWGTPLTFGQGTKVEIK |
| 27 | Fab0060 | DIQLTQSPSSLSASVGDRVTITCRASDGLYSNLAWYQQKPGKAP |
| | | KLLIYDATKLASGVPSRFSGSGSGTDYTLTISSLQPEDFATYYCQ |
| | | HFWGTPLTFGQGTKVEIK |
| 27 | Fab0061 | DIQLTQSPSSLSASVGDRVTITCRASDGLYSNLAWYQQKPGKAP |
| | | KLLIYDATKLASGVPSRFSGSGSGTDYTLTISSLQPEDFATYYCQ |
| | | HFWGTPLTFGQGTKVEIK |
| 28 | Fab0062 | DIQLTQSPSSLSASVGDRVTITCRASDGLYSNLAWYQQKPGKAP |
| | | KLLIYDAFNLASGVPSRFSGSGSGTDYTLTISSLQPEDFATYYCQ |
| | | HFWGTPLTFGQGTKVEIK |
| 29 | Fab0063 | DIQLTQSPSSLSASVGDRVTITCRASDGLYSNLAWYQQKPGKAP |
| | | KLLIYDATRLASGVPSRFSGSGSGTDYTLTISSLQPEDFATYYCQ |
| | | HFWGTPLTFGQGTKVEIK |
| 30 | Fab0064 | DIQLTQSPSSLSASVGDRVTITCRASDGLYSNLAWYQQKPGKAP |
| | | KLLIYDAKNLASGVPSRFSGSGSGTDYTLTISSLQPEDFATYYCQ |
| | | HFWGTPLTFGQGTKVEIK |
| 31 | Fab0065 | DIQLTQSPSSLSASVGDRVTITCRASDNLYRNLAWYQQKPGKAP |
| | | KLLIYDATKLASGVPSRFSGSGSGTDYTLTISSLQPEDFATYYCQ |
| | | HFWGTPLTFGQGTKVEIK |
| 28 | Fab0066 | DIQLTQSPSSLSASVGDRVTITCRASDGLYSNLAWYQQKPGKAP |
| | | KLLIYDAFNLASGVPSRFSGSGSGTDYTLTISSLQPEDFATYYCQ |
| | | HFWGTPLTFGQGTKVEIK |
| 31 | Fab0067 | DIQLTQSPSSLSASVGDRVTITCRASDNLYRNLAWYQQKPGKAP |
| | | KLLIYDATKLASGVPSRFSGSGSGTDYTLTISSLQPEDFATYYCQ |
| | | HFWGTPLTFGQGTKVEIK |
| 27 | Fab0068 | DIQLTQSPSSLSASVGDRVTITCRASDGLYSNLAWYQQKPGKAP |
| | | KLLIYDATKLASGVPSRFSGSGSGTDYTLTISSLQPEDFATYYCQ |
| | | HFWGTPLTFGQGTKVEIK |
| 27 | Fab0069 | DIQLTQSPSSLSASVGDRVTITCRASDGLYSNLAWYQQKPGKAP |
| | | KLLIYDATKLASGVPSRFSGSGSGTDYTLTISSLQPEDFATYYCQ |
| | | HFWGTPLTFGQGTKVEIK |
| 32 | Fab0070 | DIQLTQSPSSLSASVGDRVTITCRASDKLYSNLAWYQQKPGKAP |
| | | KLLIYDATLLASGVPSRFSGSGSGTDYTLTISSLQPEDFATYYCQ |
| | | HFWGTPLTFGQGTKVEIK |
| 33 | Fab0071 | DIQLTQSPSSLSASVGDRVTITCRASDGLYSNLAWYQQKPGKAP |
| | | KLLIYDARNLASGVPSRFSGSGSGTDYTLTISSLQPEDFATYYCQ |
| | | HFWGTPLTFGQGTKVEIK |
| 34 | Fab0072 | DIQLTQSPSSLSASVGDRVTITCRASDNLYRNLAWYQQKPGKAP |
| | | KLLIYDARNLASGVPSRFSGSGSGTDYTLTISSLQPEDFATYYCQ |
| | | HFWGTPLTFGQGTKVEIK |
| 31 | Fab0073 | DIQLTQSPSSLSASVGDRVTITCRASDNLYRNLAWYQQKPGKAP |
| | | KLLIYDATKLASGVPSRFSGSGSGTDYTLTISSLQPEDFATYYCQ |
| | | HFWGTPLTFGQGTKVEIK |
| 30 | Fab0074 | DIQLTQSPSSLSASVGDRVTITCRASDGLYSNLAWYQQKPGKAP |
| | | KLLIYDAKNLASGVPSRFSGSGSGTDYTLTISSLQPEDFATYYCQ |
| | | HFWGTPLTFGQGTKVEIK |

[0218] In some embodiments, the VL comprises a sequence of any one of the sequences listed in Table B. Each of the Fabs described in Table B may have a heavy chain constant region that comprises or consists of the sequence:

(SEQ ID NO: 4)
ASTKGPSVFPLAPSSKSTSGGTAALGCLVKDYFPEPVTVSWNSGALTSGV
HTFPAVLQSSGLYSLSSVVTVPSSSLGTQTYICNVNHKPSNTKVDKRVEP
KSCDKTH.

TABLE B
VH chains with CDR mutation combinations in bold.

| SEQ | | |
|---|---|---|
| ID | | |
| NO. | Fab | VH SEQUENCE |
| 35 | Fab0002 | EVQLVQSGAEVKKPGASVKVSCKASGYTFTSYWMHWVRQAP |
| | | GQRLEWIGEINPTNGRTNYIEKFKSRATLTVDKSASTAYMELSS |
| | | LRSEDTAVYYCARGTRAYHYWGQGTMVTVSS |
| 36 | Fab0060 | EVQLVESGGGLVQPGGSLRLSCATSGYTFTSYWVHWVRQAP |
| | | GKGLEWVAEINPTNGRTNYIEKFKSRITLSVDKSKSTVYLQM |
| | | NSLRAEDTAVYYCARGTRAYHYWGQGTLVTVSS |
| 37 | Fab0061 | EVQLVESGGGLVQPGGSLRLSCATSGYTFTSYWMHWVRQAP |
| | | GKGLEWVAEINPTNGRVNYIEKFKSRITLSVDKSKSTVYLQM |
| | | NSLRAEDTAVYYCARGTRAYHYWGQGTLVTVSS |
| 37 | Fab0062 | EVQLVESGGGLVQPGGSLRLSCATSGYTFTSYWMHWVRQAP |
| | | GKGLEWVAEINPTNGRVNYIEKFKSRITLSVDKSKSTVYLQM |
| | | NSLRAEDTAVYYCARGTRAYHYWGQGTLVTVSS |
| 37 | Fab0063 | EVQLVESGGGLVQPGGSLRLSCATSGYTFTSYWMHWVRQAP |
| | | GKGLEWVAEINPTNGRVNYIEKFKSRITLSVDKSKSTVYLQM |
| | | NSLRAEDTAVYYCARGTRAYHYWGQGTLVTVSS |
| 37 | Fab0064 | EVQLVESGGGLVQPGGSLRLSCATSGYTFTSYWMHWVRQAP |
| | | GKGLEWVAEINPTNGRVNYIEKFKSRITLSVDKSKSTVYLQM |
| | | NSLRAEDTAVYYCARGTRAYHYWGQGTLVTVSS |
| 38 | Fab0065 | EVQLVESGGGLVQPGGSLRLSCATSGYTFTSYWVHWVRQAP |
| | | GKGLEWVAEINPTNGRSNYIEKFKSRITLSVDKSKSTVYLQM |
| | | NSLRAEDTAVYYCARGTRAYHYWGQGTLVTVSS |
| 39 | Fab0066 | EVQLVESGGGLVQPGGSLRLSCATSGYTFTSYWVHWVRQAP |
| | | GKGLEWVAEINPTNGRVNYIEKFKSRITLSVDKSKSTVYLQM |
| | | NSLRAEDTAVYYCARGTRAYHYWGQGTLVTVSS |
| 36 | Fab0067 | EVQLVESGGGLVQPGGSLRLSCATSGYTFTSYWVHWVRQAP |
| | | GKGLEWVAEINPTNGRTNYIEKFKSRITLSVDKSKSTVYLQM |
| | | NSLRAEDTAVYYCARGTRAYHYWGQGTLVTVSS |
| 39 | Fab0068 | EVQLVESGGGLVQPGGSLRLSCATSGYTFTSYWVHWVRQAP |
| | | GKGLEWVAEINPTNGRVNYIEKFKSRITLSVDKSKSTVYLQM |
| | | NSLRAEDTAVYYCARGTRAYHYWGQGTLVTVSS |
| 38 | Fab0069 | EVQLVESGGGLVQPGGSLRLSCATSGYTFTSYWVHWVRQAP |
| | | GKGLEWVAEINPTNGRSNYIEKFKSRITLSVDKSKSTVYLQM |
| | | NSLRAEDTAVYYCARGTRAYHYWGQGTLVTVSS |
| 40 | Fab0070 | EVQLVESGGGLVQPGGSLRLSCATSGFTFTSYWMHWVRQAP |
| | | GKGLEWVAEINPTNGRTNYIEKFKSRITLSVDKSKSTVYLQM |
| | | NSLRAEDTAVYYCARGTRAYHYWGQGTLVTVSS |
| 41 | Fab0071 | EVQLVESGGGLVQPGGSLRLSCATSGYTFNSYWMHWVRQAP |
| | | GKGLEWVAEINPTNGRTNYIEKFKSRITLSVDKSKSTVYLQM |
| | | NSLRAEDTAVYYCARGTRAYHYWGQGTLVTVSS |
| 42 | Fab0072 | EVQLVESGGGLVQPGGSLRLSCATSGYTFNSYWMHWVRQAP |
| | | GKGLEWVAEINPTNGRFNYIEKFKSRITLSVDKSKSTVYLQM |
| | | NSLRAEDTAVYYCARGTRAYHYWGQGTLVTVSS |
| 43 | Fab0073 | EVQLVESGGGLVQPGGSLRLSCATSGYTFKSYWMHWVRQAP |
| | | GKGLEWVAEINPTNGRTNYIEKFKSRITLSVDKSKSTVYLQM |
| | | NSLRAEDTAVYYCARGTRAYHYWGQGTLVTVSS |
| 43 | Fab0074 | EVQLVESGGGLVQPGGSLRLSCATSGYTFKSYWMHWVRQAP |
| | | GKGLEWVAEINPTNGRTNYIEKFKSRITLSVDKSKSTVYLQM |
| | | NSLRAEDTAVYYCARGTRAYHYWGQGTLVTVSS |

[0219] Tables C-H show the CDR1, CDR2, and CDR3 variants from VL and VH with the combined beneficial mutations.

TABLE C
VL CDR1 variant

| SEQ ID NO: | Fab | CDR1 |
|---|---|---|
| 6 | Fab0060 | RASDGLYSNLA |
| 6 | Fab0061 | RASDGLYSNLA |
| 6 | Fab0062 | RASDGLYSNLA |
| 6 | Fab0063 | RASDGLYSNLA |
| 6 | Fab0064 | RASDGLYSNLA |
| 7 | Fab0065 | RASDNLYRNLA |
| 6 | Fab0066 | RASDGLYSNLA |
| 7 | Fab0067 | RASDNLYRNLA |
| 6 | Fab0068 | RASDGLYSNLA |
| 6 | Fab0069 | RASDGLYSNLA |
| 8 | Fab0070 | RASDKLYSNLA |
| 6 | Fab0071 | RASDGLYSNLA |
| 7 | Fab0072 | RASDNLYRNLA |
| 7 | Fab0073 | RASDNLYRNLA |
| 6 | Fab0074 | RASDGLYSNLA |

TABLE D
VL CDR2 variants

| SEQ ID NO: | Fab | CDR2 |
|---|---|---|
| 13 | Fab0060 | DATKLAS |
| 13 | Fab0061 | DATKLAS |
| 11 | Fab0062 | DAFNLAS |
| 12 | Fab0063 | DATRLAS |
| 14 | Fab0064 | DAKNLAS |
| 13 | Fab0065 | DATKLAS |
| 11 | Fab0066 | DAFNLAS |
| 13 | Fab0067 | DATKLAS |
| 13 | Fab0068 | DATKLAS |
| 13 | Fab0069 | DATKLAS |
| 9 | Fab0070 | DATLLAS |
| 10 | Fab0071 | DARNLAS |
| 10 | Fab0072 | DARNLAS |
| 13 | Fab0073 | DATKLAS |
| 14 | Fab0074 | DAKNLAS |

TABLE E
VL CDR3 variant

| SEQ ID NO: | Fab | CDR3 |
|---|---|---|
| 15 | Fab0060 | QHFWGTPLT |
| 15 | Fab0061 | QHFWGTPLT |
| 15 | Fab0062 | QHFWGTPLT |
| 15 | Fab0063 | QHFWGTPLT |
| 15 | Fab0064 | QHFWGTPLT |
| 15 | Fab0065 | QHFWGTPLT |
| 15 | Fab0066 | QHFWGTPLT |
| 15 | Fab0067 | QHFWGTPLT |
| 15 | Fab0068 | QHFWGTPLT |
| 15 | Fab0069 | QHFWGTPLT |
| 15 | Fab0070 | QHFWGTPLT |
| 15 | Fab0071 | QHFWGTPLT |
| 15 | Fab0072 | QHFWGTPLT |
| 15 | Fab0073 | QHFWGTPLT |
| 15 | Fab0074 | QHFWGTPLT |

TABLE F
VH CDR1 variants

| SEQ ID NO: | Fab | CDR1 |
|---|---|---|
| 19 | Fab0060 | GYTFTSYWVH |
| 20 | Fab0061 | GYTFTSYWMH |
| 20 | Fab0062 | GYTFTSYWMH |
| 20 | Fab0063 | GYTFTSYWMH |
| 20 | Fab0064 | GYTFTSYWMH |
| 19 | Fab0065 | GYTFTSYWVH |
| 19 | Fab0066 | GYTFTSYWVH |
| 19 | Fab0067 | GYTFTSYWVH |
| 19 | Fab0068 | GYTFTSYWVH |
| 19 | Fab0069 | GYTFTSYWVH |
| 18 | Fab0070 | GFTFTSYWMH |
| 16 | Fab0071 | GYTFNSYWMH |
| 16 | Fab0072 | GYTFNSYWMH |
| 17 | Fab0073 | GYTFKSYWMH |
| 17 | Fab0074 | GYTFKSYWMH |

TABLE G
VH CDR2 variants

| SEQ ID NO: | Fab | CDR2 |
|---|---|---|
| 23 | Fab0060 | EINPTNGRTNYIEKFKS |
| 21 | Fab0061 | EINPTNGRVNYIEKFKS |
| 21 | Fab0062 | EINPTNGRVNYIEKFKS |
| 21 | Fab0063 | EINPTNGRVNYIEKFKS |
| 21 | Fab0064 | EINPTNGRVNYIEKFKS |
| 24 | Fab0065 | EINPTNGRSNYIEKFKS |
| 21 | Fab0066 | EINPTNGRVNYIEKFKS |
| 23 | Fab0067 | EINPTNGRTNYIEKFKS |
| 21 | Fab0068 | EINPTNGRVNYIEKFKS |
| 24 | Fab0069 | EINPTNGRSNYIEKFKS |
| 23 | Fab0070 | EINPTNGRTNYIEKFKS |
| 23 | Fab0071 | EINPTNGRTNYIEKFKS |
| 22 | Fab0072 | EINPTNGRFNYIEKFKS |
| 23 | Fab0073 | EINPTNGRTNYIEKFKS |
| 23 | Fab0074 | EINPTNGRTNYIEKFKS |

TABLE H
VH CDR3 variants

| SEQ ID NO: | Fab | CDR3 |
|---|---|---|
| 25 | Fab0060 | GTRAYHY |
| 25 | Fab0061 | GTRAYHY |
| 25 | Fab0062 | GTRAYHY |
| 25 | Fab0063 | GTRAYHY |
| 25 | Fab0064 | GTRAYHY |
| 25 | Fab0065 | GTRAYHY |
| 25 | Fab0066 | GTRAYHY |
| 25 | Fab0067 | GTRAYHY |
| 25 | Fab0068 | GTRAYHY |
| 25 | Fab0069 | GTRAYHY |
| 25 | Fab0070 | GTRAYHY |
| 25 | Fab0071 | GTRAYHY |
| 25 | Fab0072 | GTRAYHY |
| 25 | Fab0073 | GTRAYHY |
| 25 | Fab0074 | GTRAYHY |

[0220] In some embodiments, RNAi agents may be conjugated to an antigen binding protein specific to a non-human mammal to carry out studies. RNAi agents may be conjugated to a mouse-specific anti-transferrin antibody such as Fab0016. Fab0016 as used herein refers to an antibody fragment having a light chain sequence of: DIQMTQSPASLSASLEEIVTITCQASQDIGNWLAWYQQKPGKSPQLLIYGATSLADGV PSRFSGSRSGTQFSLKISRVQVEDIGIYYCLQAYNTPWTFGGGTKLELKRADAAPTVS IFPPSTEQLATGGASWCLMNNFYPRDISVKWKIDGTERRDGVLDSVTDQDSKDSTY SMSSTLSLTKADYESHNLYTCEVVHKTSSSPVVKSFNRNEC (SEQ ID NO: 44), and a heavy chain sequence of:

(SEQ ID NO: 45)
EVQLVESGGGLVQPGNSLTLSCVASGFTFSNYGMHWIRQAPKKGLEWIAM
IYYDSSKMNYADTVKGRFTISRDNSKNTLYLEMNSLRSEDTAMYYCAVPT
SHYVVDVWGQGVSVTVSSAETTAPSVYPLAPGTALKSNSMVTLGCLVKGY
FPEPVTVTWNSGALSSGVHTFPAVLQSGLYTLTSSVTVPSSTWSSQAVTC
NVAHPASSTKVDKKIVPREC.

[0221] In some embodiments, the Fab binds TfR1. In some embodiments, the Fab binds TfR1 with an affinity of at least about 1, 2, 3, 4, 5, 6, 7, 8, 9, 10, 20, 30, 40, 50, 60, 70, 80, 90, 100 nM. In some embodiments, the Fab binds TfR1 with an affinity of about 1, 2, 3, 4, 5, 6, 7, 8, 9, 10, 20, 30, 40, 50, 60, 70, 80, 90, 100 nM. In some embodiments, the Fab binds TfR1 with an affinity of at least about 1 nM. In some embodiments, the Fab binds TfR1 with a KD value of at least about 1, 2, 3, 4, 5, 6, 7, 8, 9, 10, 20, 30, 40, 50, 60, 70, 80, 90, 100 nM. In some embodiments, the Fab binds TfR1 with a KD value of about 1, 2, 3, 4, 5, 6, 7, 8, 9, 10, 20, 30, 40, 50, 60, 70, 80, 90, 100 nM. In some embodiments, the Fab binds TfR1 with a KD value of at least about 1 nM.

[0222] In some embodiments, the Fab is conjugated to an RNAi agent disclosed herein. In some embodiments, the RNAi agent is conjugated to the Fab using a covalent or non-covalent bond, ionic bond, hydrogen bond, hydrophobic interaction, peptide, polymer, or a nucleic acid binding protein. In some embodiments, the RNAi agent is conjugated to the Fab using a covalent bond. In some embodiments, the RNAi agent is conjugated to the Fab via a lysine residue or a cysteine residue. In some embodiments, the RNAi agent is conjugated to the Fab via a lysine residue. In some embodiments, the RNAi agent is conjugated to the Fab via a cysteine residue. In some embodiments, the RNAi agent is conjugated to the Fab in a site-specific manner. In some embodiments, the RNAi agent is conjugated to the Fab in a non-site-specific manner.

[0223] In some embodiments, the RNAi agent is conjugated to the Fab at the 5′ terminus or the 3′ terminus of the RNAi agent. In some embodiments, the RNAi agent is conjugated to the Fab at the 5′ terminus of the RNAi agent. In some embodiments, the RNAi agent is conjugated to the Fab at the 3′ terminus of the RNAi agent. In some embodiments, the RNAi agent is conjugated to the Fab at the 5′ terminus or the 3′ terminus of the sense strand of the RNAi agent. In some embodiments, the RNAi agent is conjugated to the Fab at the 5′ terminus of the sense strand of the RNAi agent. In some embodiments, the RNAi agent is conjugated to the Fab at the 3′ terminus of the sense strand of the RNAi agent.

### Pharmaceutical Compositions and Formulations

[0224] The HTT RNAi agents disclosed herein can be prepared as pharmaceutical compositions or formulations (also referred to herein as “medicaments”). In some embodiments, pharmaceutical compositions include at least one HTT RNAi agent. These pharmaceutical compositions are particularly useful in the inhibition of the expression of HTT mRNA in a target cell, a group of cells, a tissue, or an organism. The pharmaceutical compositions can be used to treat a subject having a disease, disorder, or condition that would benefit from reduction in the level of the target mRNA, or inhibition in expression of the target gene. The pharmaceutical compositions can be used to treat a subject at risk of developing a disease or disorder that would benefit from reduction of the level of the target mRNA or an inhibition in expression the target gene. In one embodiment, the method includes administering an HTT RNAi agent linked to an antigen binding protein as described herein, to a subject to be treated. In some embodiments, one or more pharmaceutically acceptable excipients (including vehicles, carriers, diluents, and/or delivery polymers) are added to the pharmaceutical compositions that include an HTT RNAi agent, thereby forming a pharmaceutical formulation or medicament suitable for in vivo delivery to a subject, including a human.

[0225] The pharmaceutical compositions that include an HTT RNAi agent and methods disclosed herein decrease the level of the target mRNA in a cell, group of cells, tissue, organ, or subject, including by administering to the subject a therapeutically effective amount of a herein described HTT RNAi agent, thereby inhibiting the expression of HTT mRNA in the subject. In some embodiments, the subject has been previously identified or diagnosed as having a disease or disorder that can be mediated at least in part by a reduction in HTT gene expression. In some embodiments, the subject has been previously diagnosed with having one or more neurodegenerative diseases such as Huntington's Disease. In some embodiments the neurodegenerative disease is Huntington's Disease.

[0226] In some embodiments the subject has been previously diagnosed with having neurodegenerative disease.

[0227] Embodiments of the present disclosure include pharmaceutical compositions for delivering an HTT RNAi agent to a CNS cell in vivo. Such pharmaceutical compositions can include, for example, an HTT RNAi agent conjugated to an antigen binding protein.

[0228] In some embodiments, the described pharmaceutical compositions including an HTT RNAi agent are used for treating or managing clinical presentations in a subject that would benefit from the inhibition of expression of HTT. In some embodiments, a therapeutically or prophylactically effective amount of one or more of pharmaceutical compositions is administered to a subject in need of such treatment. In some embodiments, administration of any of the disclosed HTT RNAi agents can be used to decrease the number, severity, and/or frequency of symptoms of a disease in a subject.

[0229] In some embodiments, the described HTT RNAi agents are optionally combined with one or more additional (i.e., second, third, etc.) therapeutics. A second therapeutic can be another HTT RNAi agent (e.g., an HTT RNAi agent that targets a different sequence within an HTT gene). In some embodiments, a second therapeutic can be an RNAi agent that targets the HTT gene. An additional therapeutic can also be a small molecule drug, antibody, antibody fragment, and/or aptamer. The HTT RNAi agents, with or without the one or more additional therapeutics, can be combined with one or more excipients to form pharmaceutical compositions.

[0230] The described pharmaceutical compositions that include an HTT RNAi agent can be used to treat at least one symptom in a subject having a disease or disorder that would benefit from reduction or inhibition in expression of HTT mRNA. In some embodiments, the subject is administered a therapeutically effective amount of one or more pharmaceutical compositions that include an HTT RNAi agent thereby treating the symptom. In other embodiments, the subject is administered a prophylactically effective amount of one or more HTT RNAi agents, thereby preventing or inhibiting the at least one symptom.

[0231] In some embodiments, one or more of the described HTT RNAi agents are administered to a mammal in a pharmaceutically acceptable carrier or diluent. In some embodiments, the mammal is a human.

[0232] The route of administration is the path by which an HTT RNAi agent is brought into contact with the body. In general, methods of administering drugs, oligonucleotides, and nucleic acids including the CNS, for treatment of a mammal are well known in the art and can be applied to administration of the compositions described herein. The HTT RNAi agents disclosed herein can be administered via any suitable route in a preparation appropriately tailored to the particular route. Thus, in some embodiments, the herein described pharmaceutical compositions are administered via inhalation, intranasal administration, intratracheal administration, or oropharyngeal aspiration administration. In some embodiments, the pharmaceutical compositions can be administered by injection, for example, intravenously, intramuscularly, intracutaneously, subcutaneously, intracerebroventricularly, intraarticularly, intraocularly, or intraperitoneally, or topically.

[0233] The pharmaceutical compositions including an HTT RNAi agent described herein can be delivered to a cell, group of cells, tissue, or subject using oligonucleotide delivery technologies known in the art. In general, any suitable method recognized in the art for delivering a nucleic acid molecule (in vitro or in vivo) can be adapted for use with the compositions described herein. For example, delivery can be by local administration, (e.g., direct injection, implantation, or topical administering), systemic administration, or subcutaneous, intravenous, intraperitoneal, or parenteral routes, including intracranial (e.g., intraventricular, intraparenchymal and intrathecal), intracerebroventricular, intramuscular, transdermal, airway (aerosol), nasal, oral, rectal, or topical (including buccal and sublingual) administration. In some embodiments, the compositions are administered via inhalation, intranasal administration, oropharyngeal aspiration administration, or intratracheal administration. For example, in some embodiments, it is desired that the HTT RNAi agents described herein inhibit the expression of an HTT gene in the CNS.

[0234] In some embodiments, the pharmaceutical compositions described herein comprise one or more pharmaceutically acceptable excipients. The pharmaceutical compositions described herein are formulated for administration to a subject.

[0235] As used herein, a pharmaceutical composition or medicament includes a pharmacologically effective amount of at least one of the described therapeutic compounds and one or more pharmaceutically acceptable excipients. Pharmaceutically acceptable excipients (excipients) are substances other than the Active Pharmaceutical Ingredient (API, therapeutic product, e.g., HTT RNAi agent) that are intentionally included in the drug delivery system. Excipients do not exert or are not intended to exert a therapeutic effect at the intended dosage. Excipients can act to a) aid in processing of the drug delivery system during manufacture, b) protect, support or enhance stability, bioavailability or patient acceptability of the API, c) assist in product identification, and/or d) enhance any other attribute of the overall safety, effectiveness, of delivery of the API during storage or use. A pharmaceutically acceptable excipient may or may not be an inert substance.

[0236] Excipients include, but are not limited to: absorption enhancers, anti-adherents, anti-foaming agents, anti-oxidants, binders, buffering agents, carriers, coating agents, colors, delivery enhancers, delivery polymers, detergents, dextran, dextrose, diluents, disintegrants, emulsifiers, extenders, fillers, flavors, glidants, humectants, lubricants, oils, polymers, preservatives, saline, salts, solvents, sugars, surfactants, suspending agents, sustained release matrices, sweeteners, thickening agents, tonicity agents, vehicles, water-repelling agents, and wetting agents.

[0237] Pharmaceutical compositions suitable for injectable use include sterile aqueous solutions (where water-soluble) or dispersions and sterile powders for the extemporaneous preparation of sterile injectable solutions or dispersion. For intravenous administration, suitable carriers include physiological saline, bacteriostatic water, Cremophor® ELTM (BASF, Parsippany, NJ) or phosphate buffered saline (PBS). It should be stable under the conditions of manufacture and storage and should be preserved against the contaminating action of microorganisms such as bacteria and fungi. The carrier can be a solvent or dispersion medium containing, for example, water, ethanol, polyol (for example, glycerol, propylene glycol, and liquid polyethylene glycol), and suitable mixtures thereof. The proper fluidity can be maintained, for example, by the use of a coating such as lecithin, by the maintenance of the required particle size in the case of dispersion and by the use of surfactants. In many cases, it will be preferable to include isotonic agents, for example, sugars, polyalcohols such as mannitol, sorbitol, and sodium chloride in the composition. Prolonged absorption of the injectable compositions can be brought about by including in the composition an agent which delays absorption, for example, aluminum monostearate and gelatin.

[0238] Sterile injectable solutions can be prepared by incorporating the active compound in the required amount in an appropriate solvent with one or a combination of ingredients enumerated above, as required, followed by filter sterilization. Generally, dispersions are prepared by incorporating the active compound into a sterile vehicle which contains a basic dispersion medium and the required other ingredients from those enumerated above. In the case of sterile powders for the preparation of sterile injectable solutions, methods of preparation include vacuum drying and freeze-drying which yields a powder of the active ingredient plus any additional desired ingredient from a previously sterile-filtered solution thereof.

[0239] Formulations suitable for intra-articular administration can be in the form of a sterile aqueous preparation of the drug that can be in microcrystalline form, for example, in the form of an aqueous microcrystalline suspension. Liposomal formulations or biodegradable polymer systems can also be used to present the drug for both intra-articular and ophthalmic administration.

[0240] The active compounds can be prepared with carriers that will protect the compound against rapid elimination from the body, such as a controlled release formulation, including implants and microencapsulated delivery systems. Biodegradable, biocompatible polymers can be used, such as ethylene vinyl acetate, polyanhydrides, polyglycolic acid, collagen, polyorthoesters, and polylactic acid. Methods for preparation of such formulations will be apparent to those skilled in the art. Liposomal suspensions can also be used as pharmaceutically acceptable carriers. These can be prepared according to methods known to those skilled in the art, for example, as described in U.S. Pat. No. 4,522,811.

[0241] The HTT RNAi agents can be formulated in compositions in dosage unit form for ease of administration and uniformity of dosage. Dosage unit form refers to physically discrete units suited as unitary dosages for the subject to be treated; each unit containing a predetermined quantity of active compound calculated to produce the desired therapeutic effect in association with the required pharmaceutical carrier. The specification for the dosage unit forms of the disclosure are dictated by and directly dependent on the unique characteristics of the active compound and the therapeutic effect to be achieved, and the limitations inherent in the art of compounding such an active compound for the treatment of individuals.

[0242] A pharmaceutical composition can contain other additional components commonly found in pharmaceutical compositions. Such additional components include, but are not limited to: anti-pruritics, astringents, local anesthetics, or anti-inflammatory agents (e.g., antihistamine, diphenhydramine, etc.). It is also envisioned that cells, tissues, or isolated organs that express or comprise the herein defined RNAi agents may be used as “pharmaceutical compositions.” As used herein, “pharmacologically effective amount,” “therapeutically effective amount,” or simply “effective amount” refers to that amount of an RNAi agent to produce a pharmacological, therapeutic, or preventive result.

[0243] In some embodiments, HTT RNAi agent pharmaceutical compositions may contain salts such as sodium chloride, calcium chloride, magnesium chloride, potassium chloride, sodium phosphate dibasic, sodium phosphate monobasic, or combinations thereof.

[0244] In some embodiments, the methods disclosed herein further comprise the step of administering a second therapeutic or treatment in addition to administering an RNAi agent disclosed herein. In some embodiments, the second therapeutic is another HTT RNAi agent (e.g., an HTT RNAi agent that targets a different sequence within the HTT target). In other embodiments, the second therapeutic can be a small molecule drug, an antibody, an antibody fragment, and/or an aptamer.

[0245] In some embodiments, described herein are compositions that include a combination or cocktail of at least two HTT RNAi agents having different sequences. In some embodiments, the two or more HTT RNAi agents are each separately and independently linked to antigen binding proteins.

[0246] Described herein are compositions for delivery of HTT RNAi agents to central nervous system (CNS) cells. Furthermore, compositions for delivery of HTT RNAi agents to cells, including neurons, astrocytes, microglia and endothelial cells, in vivo, are generally described herein.

[0247] Generally, an effective amount of an HTT RNAi agent disclosed herein will be in the range of from about 0.0001 to about 20 mg/kg of body weight dose, e.g., from about 0.001 to about 5 mg/kg of body weight dose. In some embodiments, an effective amount of an HTT RNAi agent will be in the range of from about 0.01 mg/kg to about 3.0 mg/kg of body weight per dose. In some embodiments, an effective amount of an HTT RNAi agent will be in the range of from about 0.03 mg/kg to about 2.0 mg/kg of body weight per dose. In some embodiments, an effective amount of an HTT RNAi agent will be in the range of from about 0.01 to about 1.0 mg/kg. In some embodiments, an effective amount of an HTT RNAi agent will be in the range of from about 0.50 to about 1.0 mg/kg. In some embodiments, a fixed dose of HTT RNAi agent is administered to the subject. In some embodiments the dose administered to the human subject is between about 1.0 mg and about 750 mg. In some embodiments, the dose of HTT RNAi agent administered to the human subject is between about 10 mg and about 450 mg. In some embodiments, the dose of HTT RNAi agent administered to the human subject is between about 25 mg and about 450 mg. In some embodiments, the dose of HTT RNAi agent administered to the human subject is about 50 mg, about 75 mg, about 100 mg, about 150 mg, about 200 mg, about 250 mg, about 300 mg, about 350 mg, about 400 mg, or about 450 mg. The amount administered will also likely depend on such variables as the overall health status of the patient, the relative biological efficacy of the compound delivered, the formulation of the drug, the presence and types of excipients in the formulation, and the route of administration. Also, it is to be understood that the initial dosage administered can be increased beyond the above upper level to rapidly achieve the desired blood-level or tissue level, or the initial dosage can be smaller than the optimum. In some embodiments, a dose is administered daily. In some embodiments, a dose is administered weekly. In further embodiments, a dose is administered bi-weekly, tri-weekly, once monthly, or once quarterly (i.e., once every three months).

[0248] For treatment of disease or for formation of a medicament or composition for treatment of a disease, the pharmaceutical compositions described herein including an HTT RNAi agent can be combined with an excipient or with a second therapeutic agent or treatment including, but not limited to: a second or other RNAi agent, a small molecule drug, an antibody, an antibody fragment, peptide, and/or an aptamer.

[0249] The described HTT RNAi agents, when added to pharmaceutically acceptable excipients or adjuvants, can be packaged into kits, containers, packs, or dispensers.

### Methods of Treatment and Inhibition of HTT Gene Expression

[0250] The HTT RNAi agents disclosed herein can be used to treat a subject (e.g., a human or other mammal) having a disease or disorder that would benefit from administration of the RNAi agent. In some embodiments, the RNAi agents disclosed herein can be used to treat a subject (e.g., a human) that would benefit from a reduction and/or inhibition in expression of HTT mRNA and/or a reduction in HTT protein levels.

[0251] In some embodiments, the RNAi agents disclosed herein can be used to treat a subject (e.g., a human) having a disease or disorder for which the subject would benefit from reduction in HTT protein, including but not limited to, Huntington's Disease. Treatment of a subject can include therapeutic and/or prophylactic treatment. The subject is administered a therapeutically effective amount of any one or more HTT RNAi agents described herein. The subject can be a human, patient, or human patient. The subject may be an adult, adolescent, child, or infant. Administration of a pharmaceutical composition described herein can be to a human being or animal.

[0252] Mutant HTT activity is known to promote neurodegenerative disorders. In some embodiments, the described HTT RNAi agents are used to treat at least one symptom mediated at least in part by a reduction in mutant HTT protein levels, in a subject. The subject is administered a therapeutically effective amount of any one or more of the described HTT RNAi agents. In some embodiments, the subject is administered a prophylactically effective amount of any one or more of the described RNAi agents, thereby treating the subject by preventing or inhibiting the at least one symptom.

[0253] In certain embodiments, the present disclosure provides methods for treatment of diseases, disorders, conditions, or pathological states mediated at least in part by HTT gene expression, in a patient in need thereof, wherein the methods include administering to the patient any of the HTT RNAi agents described herein.

[0254] In some embodiments, the HTT RNAi agents are used to treat or manage a clinical presentation or pathological state in a subject, wherein the clinical presentation or pathological state is mediated at least in part by a reduction in HTT gene expression. The subject is administered a therapeutically effective amount of one or more of the HTT RNAi agents or HTT RNAi agent-containing compositions described herein. In some embodiments, the method comprises administering a composition comprising an HTT RNAi agent described herein to a subject to be treated.

[0255] In a further aspect, the disclosure features methods of treatment (including prophylactic or preventative treatment) of diseases or symptoms that may be addressed by a reduction in HTT protein levels, the methods comprising administering to a subject in need thereof an HTT RNAi agent that includes an antisense strand comprising the sequence of any of the sequences in Table 2, Table 3, or Table 9. Also described herein are compositions for use in such methods.

[0256] The described HTT RNAi agents and/or compositions that include HTT RNAi agents can be used in methods for therapeutic treatment of disease or conditions caused by enhanced or elevated HTT protein levels. Such methods include administration of an HTT RNAi agent as described herein to a subject, e.g., a human or animal subject.

[0257] In another aspect, the disclosure provides methods for the treatment (including prophylactic treatment) of a pathological state (such as a condition or disease) mediated at least in part by HTT gene expression, wherein the methods include administering to a subject a therapeutically effective amount of an RNAi agent that includes an antisense strand comprising the sequence of any of the sequences in Table 2, Table 3, or Table 9.

[0258] In some embodiments, methods for inhibiting expression of an HTT gene are disclosed herein, wherein the methods include administering to a cell an RNAi agent that includes an antisense strand comprising the sequence of any of the sequences in Table 2, Table 3, or Table 9.

[0259] In some embodiments, methods for the treatment (including prophylactic treatment) of a pathological state mediated at least in part by HTT gene expression are disclosed herein, wherein the methods include administering to a subject a therapeutically effective amount of an RNAi agent that includes a sense strand comprising the sequence of any of the sequences in Table 2, Table 4, Table 5, Table 6, or Table 9.

[0260] In some embodiments, methods for inhibiting expression of an HTT gene are disclosed herein, wherein the methods comprise administering to a cell an RNAi agent that includes a sense strand comprising the sequence of any of the sequences in Table 2, Table 4, Table 5, Table 6, or Table 9.

[0261] In some embodiments, methods for the treatment (including prophylactic treatment) of a pathological state mediated at least in part by HTT gene expression are disclosed herein, wherein the methods include administering to a subject a therapeutically effective amount of an RNAi agent that includes a sense strand comprising the sequence of any of the sequences in Table 4, Table 5, Table 6, or Table 9, and an antisense strand comprising the sequence of any of the sequences in Table 3 or Table 9.

[0262] In some embodiments, methods for inhibiting expression of an HTT gene are disclosed herein, wherein the methods include administering to a cell an RNAi agent that includes a sense strand comprising the sequence of any of the sequences in Table 4, Table 5, Table 6, or Table 9, and an antisense strand comprising the sequence of any of the sequences in Table 3 or Table 9.

[0263] In some embodiments, methods of inhibiting expression of an HTT gene are disclosed herein, wherein the methods include administering to a subject an HTT RNAi agent that includes a sense strand consisting of the nucleobase sequence of any of the sequences in Table 4, Table 5, Table 6, or Table 9, and the antisense strand consisting of the nucleobase sequence of any of the sequences in Table 3 or Table 9. In other embodiments, disclosed herein are methods of inhibiting expression of an HTT gene, wherein the methods include administering to a subject an HTT RNAi agent that includes a sense strand consisting of the modified sequence of any of the modified sequences in Table 4, Table 5, Table 6, or Table 9, and the antisense strand consisting of the modified sequence of any of the modified sequences in Table 3 or Table 9.

[0264] In some embodiments, methods for inhibiting expression of an HTT gene in a cell are disclosed herein, wherein the methods include administering one or more HTT RNAi agents comprising a duplex structure of one of the duplexes set forth in Tables 7, 8, and 9.

[0265] In some embodiments, the gene expression level and/or mRNA level of an HTT gene in certain CNS cells of subject to whom a described HTT RNAi agent is administered is reduced by at least about 5%, 10%, 15%, 20%, 25%, 30%, 35%, 40%, 45%, 50%, 55%, 60%, 65%, 70%, 75%, 80%, 85%, 90%, 95%, 96%, 97%, 98%, 99%, or greater than 99%, relative to the subject prior to being administered the HTT RNAi agent or to a subject not receiving the HTT RNAi agent. In some embodiments, the HTT protein levels in certain CNS cells of a subject to whom a described HTT RNAi agent is administered is reduced by at least about 5%, 10%, 15%, 20%, 25%, 30%, 35%, 40%, 45%, 50%, 55%, 60%, 65%, 70%, 75%, 80%, 85%, 90%, 95%, 96%, 97%, 98%, 99%, or greater than 99%, relative to the subject prior to being administered the HTT RNAi agent or to a subject not receiving the HTT RNAi agent. The gene expression level, protein level, and/or mRNA level in the subject may be reduced in a cell, group of cells, and/or tissue of the subject. In some embodiments, the HTT mRNA levels in certain CNS cells subject to whom a described HTT RNAi agent has been administered is reduced by at least about 30%, 35%, 40%, 45%, 50%, 55%, 60%, 65%, 70%, 75%, 80%, 85%, 90%, 95%, or 98% relative to the subject prior to being administered the HTT RNAi agent or to a subject not receiving the HTT RNAi agent.

[0266] A reduction in gene expression, mRNA, and protein levels can be assessed by any methods known in the art. Reduction or decrease in HTT protein and/or enzyme levels are collectively referred to herein as a decrease in, reduction of, or inhibition of HTT expression. The Examples set forth herein illustrate known methods for assessing inhibition of HTT gene expression, including but not limited to determining HTT protein levels.

### Cells, Tissues, Organs, and Non-Human Organisms

[0267] Cells, tissues, organs, and non-human organisms that include at least one of the HTT RNAi agents described herein are contemplated. The cell, tissue, organ, or non-human organism is made by delivering the RNAi agent to the cell, tissue, organ, or non-human organism.

### Additional Illustrative Embodiments

[0268] Provided here are certain additional illustrative embodiments of the disclosed technology. These embodiments are illustrative only and do not limit the scope of the present disclosure or of the claims attached hereto.

[0269] Embodiment 1. An RNAi agent for inhibiting expression of a huntingtin (HTT) gene, comprising:
[0270] an antisense strand comprising at least 17 contiguous nucleotides differing by 0 or 1 nucleotides from any one of the sequences provided in Table 2 or Table 3; and
[0271] a sense strand comprising a nucleotide sequence that is at least partially complementary to the antisense strand.

[0272] Embodiment 2. The RNAi agent of claim 1, wherein the antisense strand comprises nucleotides 2-18 of any one of the sequences provided in Table 2 or Table 3.

[0273] Embodiment 3. The RNAi agent of claim 1 or claim 2, wherein the sense strand comprises a nucleotide sequence of at least 17 contiguous nucleotides differing by 0 or 1 nucleotides from any one of the sequences provided in Table 2 or Table 4, and wherein the sense strand has a region of at least 85% complementarity over the 17 contiguous nucleotides to the antisense strand.

[0274] Embodiment 4. The RNAi agent of any one of claims 1-3, wherein at least one nucleotide of the HTT RNAi agent is a modified nucleotide or includes a modified internucleoside linkage.

[0275] Embodiment 5. The RNAi agent of any one of claims 1-4, wherein all or substantially all of the nucleotides are modified nucleotides.

[0276] Embodiment 6. The RNAi agent of any one of claims 4-5, wherein the modified nucleotide is selected from the group consisting of: 2′-O-methyl nucleotide, 2′-fluoro nucleotide, 2′-deoxy nucleotide, 2′,3′-seco nucleotide mimic, locked nucleotide, 2′-F-arabino nucleotide, 2′-methoxyethyl nucleotide, abasic nucleotide, ribitol, inverted nucleotide, inverted 2′-O-methyl nucleotide, inverted 2′-deoxy nucleotide, 2′-amino-modified nucleotide, 2′-alkyl-modified nucleotide, morpholino nucleotide, vinyl phosphonate-containing nucleotide, cyclopropyl phosphonate-containing nucleotide, and 3′-O-methyl nucleotide.

[0277] Embodiment 7. The RNAi agent of claim 5, wherein all or substantially all of the nucleotides are modified with 2′-O-methyl nucleotides, 2′-fluoro nucleotides, or combinations thereof.

[0278] Embodiment 8. The RNAi agent of any one of claims 1-7, wherein the antisense strand comprises the nucleotide sequence of any one of the modified sequences provided in Table 3.

[0279] Embodiment 9. The RNAi agent of any one of claims 1-8, wherein the sense strand comprises the nucleotide sequence of any one of the modified sequences provided in Table 4.

[0280] Embodiment 10. The RNAi agent of claim 1, wherein the antisense strand comprises the nucleotide sequence of any one of the modified sequences provided in Table 3 and the sense strand comprises the nucleotide sequence of any one of the modified sequences provided in Table 4.

[0281] Embodiment 11. The RNAi agent of any one of claims 1-10, wherein the sense strand is between 18 and 30 nucleotides in length, and the antisense strand is between 18 and 30 nucleotides in length.

[0282] Embodiment 12. The RNAi agent of claim 11, wherein the sense strand and the antisense strand are each between 18 and 27 nucleotides in length.

[0283] Embodiment 13. The RNAi agent of claim 12, wherein the sense strand and the antisense strand are each between 18 and 24 nucleotides in length.

[0284] Embodiment 14. The RNAi agent of claim 13, wherein the sense strand and the antisense strand are each 21 nucleotides in length.

[0285] Embodiment 15. The RNAi agent of claim 14, wherein the RNAi agent has two blunt ends.

[0286] Embodiment 16. The RNAi agent of any one of claims 1-15, wherein the sense strand comprises one or two terminal caps.

[0287] Embodiment 17. The RNAi agent of any one of claims 1-16, wherein the sense strand comprises one or two inverted abasic residues.

[0288] Embodiment 18. The RNAi agent of claim 1, wherein the RNAi agent is comprised of a sense strand and an antisense strand that form a duplex having the structure of any one of the duplexes in Table 7, Table 8, or Table 9.

[0289] Embodiment 19. The RNAi agent of claim 18, wherein all or substantially all of the nucleotides are modified nucleotides.

[0290] Embodiment 20. The RNAi agent of any one of claims 1-19, wherein the RNAi agent is conjugated to an antigen binding protein.

[0291] Embodiment 21. The RNAi agent of claim 20, wherein the antigen binding protein is conjugated to the sense strand.

[0292] Embodiment 22. The RNAi agent of any one of claim 20 or 21, wherein the antigen binding protein is an antibody fragment (Fab) that specifically binds to one or more epitopes on a transferrin receptor (TfR1).

[0293] Embodiment 23. The RNAi agent of claim 22, wherein the Fab comprises (i) 6 complementary determining regions (CDRs), (ii) 3 CDRs on the variable light chain (VL), and/or (iii) 3 CDRs on the variable heavy chain (VH).

[0294] Embodiment 24. The RNAi agent of claim 23, wherein the variable light chain has a VL CDR1 sequence selected from the group consisting of: RASDGLYSNLA (SEQ ID NO: 6), RASDNLYRNLA (SEQ ID NO: 7), and RASDKLYSNLA (SEQ ID NO: 8); a VL CDR2 sequence selected from the group consisting of: DATLLAS (SEQ ID NO: 9), DARNLAS (SEQ ID NO: 10), DAFNLAS (SEQ ID NO: 11), DATRLAS (SEQ ID NO: 12), DATKLAS (SEQ ID NO: 13), and DAKNLAS (SEQ ID NO: 14); and/or a VL CDR 3 sequence of QHFWGTPLT (SEQ ID NO: 15).

[0295] Embodiment 25. The RNAi agent of claim 23 or 24, wherein the variable light chain is selected from any one of the VL chains shown in Table A.

[0296] Embodiment 26. The RNAi agent of any one of claims 23-25, wherein the variable light chain comprises the sequence:

(SEQ ID NO: 32)
DIQLTQSPSSLSASVGDRVTITCRASDKLYSNLAWYQQKPGKAPKLLIYD
ATLLASGVPSRFSGSGSGTDYTLTISSLQPEDFATYYCQHFWGTPLTFGQ
GTKVEIK

[0297] Embodiment 27. The RNAi agent of any one of claims 23-26, wherein the variable heavy chain has a VH CDR1 sequence selected from the group consisting of: GYTFNSYWMH (SEQ ID NO: 16), GYTFKSYWMH (SEQ ID NO: 17), GFTFTSYWMH (SEQ ID NO: 18), GYTFTSYWVH (SEQ ID NO: 19), and GYTFTSYWMH (SEQ ID NO: 20), a VH CDR2 sequence selected from the group consisting of: EINPTNGRVNYIEKFKS (SEQ ID NO: 21), EINPTNGRFNYIEKFKS (SEQ ID NO: 22), EINPTNGRTNYIEKFKS (SEQ ID NO: 23), and EINPTNGRSNYIEKFKS (SEQ ID NO: 24); and/or a VH CDR3 sequence of: GTRAYHY (SEQ ID NO: 25).

[0298] Embodiment 28. The RNAi agent of any one of claims 23-27, wherein the variable heavy chain is selected from any one of the VH chains shown in Table B.

[0299] Embodiment 29. The RNAi agent of any one of claims 23-28, wherein the variable chain comprises the

(SEQ ID NO: 40)
EVQLVESGGGLVQPGGSLRLSCATSGFTFTSYWMHWVRQAPGKGLEWVAE
INPTNGRTNYIEKFKSRITLSVDKSKSTVYLQMNSLRAEDTAVYYCARGT
RAYHYWGQGTLVTVSS

[0300] Embodiment 30. The RNAi agent of any one of claims 22-29, wherein the Fab further comprises a light constant chain 1 (CL).

[0301] Embodiment 31. The RNAi agent of claim 30, wherein the light constant chain 1 (CL) sequence is:

(SEQ ID NO: 2)
RTVAAPSVFIFPPSDEQLKSGTASVVCLLNNFYPREAKVQWKVDNALQSG
NSQESVTEQDSKDSTYSLSSTLTLSKADYEKHKVYACEVTHQGLSSPVTK
SFNRGEC.

[0302] Embodiment 32. The RNAi agent of any one of claims 22-31, wherein the Fab further comprises a heavy constant chain 1 (CH).

[0303] Embodiment 33. The RNAi agent of claim 32, wherein the heavy constant chain 1 (CH) sequence is:

(SEQ ID NO: 4)
ASTKGPSVFPLAPSSKSTSGGTAALGCLVKDYFPEPVTVSWNSGALTSGV
HTFPAVLQSSGLYSLSSVVTVPSSSLGTQTYICNVNHKPSNTKVDKRVEP
KSCDKTH.

[0304] Embodiment 34. The RNAi agent of any one of claims 22-33, wherein the antibody fragment (Fab) binds TfR1 with an affinity of at least 1 nM KD.

[0305] Embodiment 35. The RNAi agent of any one of claims 1-19, wherein the RNAi agent is conjugated to a lipid.

[0306] Embodiment 36. The RNAi agent of claim 35, wherein the lipid is selected from:

[chemical structure]

[0307] Embodiment 37. The RNAi agent of claim 35 or 36, wherein the lipid is conjugated to the sense strand.

[0308] Embodiment 38. The RNAi agent of claim 37, wherein the lipid is conjugated to the 5′ end of the sense strand.

[0309] Embodiment 39. The RNAi agent of claim 37, wherein the lipid is conjugated to the 3′ end of the sense strand.

[0310] Embodiment 40. A conjugate comprising the RNAi agent of any one of claims 1-21 conjugated to an antibody fragment (Fab) that specifically binds to one or more epitopes on a transferrin receptor (TfR1).

[0311] Embodiment 41. The conjugate of claim 40, wherein the Fab comprises (i) 6 complementary determining regions (CDRs), (ii) 3 CDRs on the variable light chain (VL), or (iii) 3 CDRs on the variable heavy chain (VH).

[0312] Embodiment 42. The conjugate of claim 41, wherein the variable light chain has a VL CDR1 sequence selected from the group consisting of: RASDGLYSNLA (SEQ ID NO: 6), RASDNLYRNLA (SEQ ID NO: 7), and RASDKLYSNLA (SEQ ID NO: 8); a VL CDR2 sequence selected from the group consisting of: DATLLAS (SEQ ID NO: 9), DARNLAS (SEQ ID NO: 10), DAFNLAS (SEQ ID NO: 11), DATRLAS (SEQ ID NO: 12), DATKLAS (SEQ ID NO: 13), and DAKNLAS (SEQ ID NO: 14); and/or a VL CDR 3 sequence of QHFWGTPLT (SEQ ID NO: 15).

[0313] Embodiment 43. The conjugate of claim 41 or 42, wherein the variable light chain is selected from any one of the VL chains shown in Table A.

[0314] Embodiment 44. The conjugate of any one of claims 41-43, wherein the variable light chain comprises the sequence:

(SEQ ID NO: 32)
DIQLTQSPSSLSASVGDRVTITCRASDKLYSNLAWYQQKPGKAPKLLIYD
ATLLASGVPSRFSGSGSGTDYTLTISSLQPEDFATYYCQHFWGTPLTFGQ
GTKVEIK

[0315] Embodiment 45. The conjugate of any one of claims 41-44, wherein the variable heavy chain has a VH CDR1 sequence selected from the group consisting of: GYTFNSYWMH (SEQ ID NO: 16), GYTFKSYWMH (SEQ ID NO: 17), GFTFTSYWMH (SEQ ID NO: 18), GYTFTSYWVH (SEQ ID NO: 19), and GYTFTSYWMH (SEQ ID NO: 20), a VH CDR2 sequence selected from the group consisting of: EINPTNGRVNYIEKFKS (SEQ ID NO: 21), EINPTNGRFNYIEKFKS (SEQ ID NO: 22), EINPTNGRTNYIEKFKS (SEQ ID NO: 23), and EINPTNGRSNYIEKFKS (SEQ ID NO: 24); and/or a VH CDR3 sequence of: GTRAYHY (SEQ ID NO: 25).

[0316] Embodiment 46. The conjugate of any one of claims 41-45, wherein the variable heavy chain is selected from any one of the VH chains shown in Table B.

[0317] Embodiment 47. The conjugate of any one of claims 41-46, wherein the variable heavy chain comprises the sequence:

(SEQ ID NO: 40)
EVQLVESGGGLVQPGGSLRLSCATSGFTFTSYWMHWVRQAPGKGLEWVAE
INPTNGRTNYIEKFKSRITLSVDKSKSTVYLQMNSLRAEDTAVYYCARGT
RAYHYWGQGTLVTVSS

[0318] Embodiment 48. The conjugate of any one of claims 40-47, wherein the Fab further comprises a light constant chain 1 (CL).

[0319] Embodiment 49. The conjugate of claim 48, wherein the light constant chain 1 (CL) sequence is:

(SEQ ID NO: 2)
RTVAAPSVFIFPPSDEQLKSGTASVVCLLNNFYPREAKVQWKVDNALQSG
NSQESVTEQDSKDSTYSLSSTLTLSKADYEKHKVYACEVTHQGLSSPVTK
SFNRGEC.

[0320] Embodiment 50. The conjugate of any one of claims 40-49, wherein the Fab further comprises a heavy constant chain 1 (CH).

[0321] Embodiment 51. The conjugate of claim 50, wherein the heavy constant chain 1 (CH) sequence is:

(SEQ ID NO: 4)
ASTKGPSVFPLAPSSKSTSGGTAALGCLVKDYFPEPVTVSWNSGALTSGV
HTFPAVLQSSGLYSLSSVVTVPSSSLGTQTYICNVNHKPSNTKVDKRVEP
KSCDKTH.

[0322] Embodiment 52. The conjugate of any one of claims 40-51, wherein the antibody fragment (Fab) binds TfR1 with an affinity of at least 1 nM KD.

[0323] Embodiment 53. The conjugate of any one of claims 40-52, wherein the RNAi agent is conjugated to the Fab using a covalent or non-covalent bond, ionic bond, hydrogen bond, hydrophobic interaction, peptide, polymer, or a nucleic acid binding protein.

[0324] Embodiment 54. The conjugate of any one of claims 40-53, wherein the RNAi agent is conjugated to the Fab through a linker comprising a structure selected from the group consisting of:

[chemical structure]

[0325] wherein [symbol] _{A} represents a point of attachment to the Fab, and [symbol] _{R} represents a point of attachment to the RNAi agent portion of the conjugate.

[0326] Embodiment 55. The conjugate of any one of claims 40-54, wherein the RNAi agent is conjugated to the Fab through a linker comprising the structure:

[chemical structure]

[0327] wherein [symbol] _{A} represents a point of attachment to the Fab, and [symbol] _{R} represents a point of attachment to the RNAi agent portion of the conjugate.

[0328] Embodiment 56. A composition comprising the RNAi agent of any one of claims 1-39, or the conjugate of any one of claims 40-55, wherein the composition further comprises a pharmaceutically acceptable excipient.

[0329] Embodiment 57. The composition of claim 56, further comprising a second RNAi agent capable of inhibiting the expression of HTT gene expression.

[0330] Embodiment 58. The composition of any one of claims 56-57, further comprising one or more additional therapeutics.

[0331] Embodiment 59. The composition of any one of claims 56-58, wherein the RNAi agent is a sodium salt.

[0332] Embodiment 60. The composition of any one of claims 56-59, wherein the pharmaceutically acceptable excipient is water for injection.

[0333] Embodiment 61. The composition of any one of claims 56-59, wherein the pharmaceutically acceptable excipient is a buffered saline solution.

[0334] Embodiment 62. A method for inhibiting expression of an HTT gene in a cell, the method comprising introducing into a cell an effective amount of an RNAi agent of any one of claims 1-39, the conjugate of any one of claims 40-55, or the composition of any one of claims 56-61.

[0335] Embodiment 63. The method of claim 62, wherein the cell is within a subject.

[0336] Embodiment 64. The method of claim 63, wherein the subject is a human subject.

[0337] Embodiment 65. The method of any one of claims 62-64, wherein following the administration of the RNAi agent the HTT gene expression is inhibited by at least about 30%.

[0338] Embodiment 66. A method of treating one or more symptoms or diseases associated with enhanced or elevated mutant HTT activity levels, the method comprising administering to a human subject in need thereof a therapeutically effective amount of the RNAi agent of any one of claims 1-39, the conjugate of any one of claims 40-55, or the composition of any one of claims 56-61.

[0339] Embodiment 67. The method of claim 66, wherein the disease is a neurodegenerative disease.

[0340] Embodiment 68. The method of claim 67, wherein the neurodegenerative disease is Huntington's Disease.

[0341] Embodiment 69. The method of claim 66, wherein the disease is Huntington's Disease.

[0342] Embodiment 70. The method of any one of claims 62-69, wherein the RNAi agent is administered at a dose of about 0.01 mg/kg to about 5.0 mg/kg of body weight of the subject.

[0343] Embodiment 71. The method of any one of claims 62-69, wherein the RNAi agent is administered at a dose of about 0.03 mg/kg to about 2.0 mg/kg of body weight of the subject.

[0344] Embodiment 72. The method of any one of claims 62-71, wherein the RNAi agent is administered in two or more doses.

[0345] Embodiment 73. Use of the RNAi agent of any one of claims 1-39, or the conjugate of any one of claims 40-55, for the treatment of a disease, disorder, or symptom that is mediated at least in part by mutant HTT activity and/or HTT gene expression.

[0346] Embodiment 74. Use of the composition according to any one of claims 56-61, for the treatment of a disease, disorder, or symptom that is mediated at least in part by HTT activity and/or HTT gene expression.

[0347] Embodiment 75. The use of any one of claims 72-74, wherein the disease is a neurodegenerative disease.

[0348] Embodiment 76. Use of the composition according to any one of claims 56-61, for the manufacture of a medicament for treatment of a disease, disorder, or symptom that is mediated at least in part by HTT activity and/or HTT gene expression.

[0349] Embodiment 77. The use of claim 76, wherein the neurodegenerative disease is Huntington's disease.

[0350] Embodiment 78. A method of making an RNAi agent of any one of claims 1-39, comprising annealing a sense strand and an antisense strand to form a double-stranded ribonucleic acid molecule.

### EXAMPLES

### Example 1. Synthesis of HTT RNAi Agents

[0351] HTT RNAi agent duplexes disclosed herein were synthesized in accordance with the following:

[0352] A. Synthesis. The sense and antisense strands of the HTT RNAi agents were synthesized according to phosphoramidite technology on solid phase used in oligonucleotide synthesis. Depending on the scale, a MerMade96E® (Bioautomation), a MerMadel2® (Bioautomation), or an OP Pilot 100 (GE Healthcare) was used. Syntheses were performed on a solid support made of controlled pore glass (CPG, 500 Å or 600 Å, obtained from Prime Synthesis, Aston, PA, USA). All RNA and 2′-modified RNA phosphoramidites were purchased from Thermo Fisher Scientific (Milwaukee, WI, USA). Specifically, the 2′-O-methyl phosphoramidites that were used included the following: (5′-O-dimethoxytrityl-N⁶-(benzoyl)-2′-O-methyl-adenosine-3′-O-(2-cyanoethyl-N,N-diisopropylamino) phosphoramidite, 5′-O-dimethoxy-trityl-N⁴-(acetyl)-2′-O-methyl-cytidine-3′-O-(2-cyanoethyl-N,N-diisopropylamino) phosphoramidite, (5′-O-dimethoxytrityl-N²-(isobutyryl)-2′-O-methyl-guanosine-3′-O-(2-cyanoethyl-N,N-diisopropylamino) phosphoramidite, and 5′-O-dimethoxytrityl-2′-O-methyl-uridine-3′-O-(2-cyanoethyl-N,N-diisopropylamino) phosphoramidite. The 2′-deoxy-2′-fluoro-phosphoramidites carried the same protecting groups as the 2′-O-methyl RNA amidites. 5′-dimethoxytrityl-2′-O-methyl-inosine-3′-O-(2-cyanoethyl-N,N-diisopropylamino) phosphoramidites were purchased from Glen Research (Virginia). The inverted abasic (3′-O-dimethoxytrityl-2′-deoxyribose-5′-O-(2-yanoethyl-N,N-diisopropylamino) phosphoramidites were purchased from ChemGenes (Wilmington, MA, USA). The following UNA phosphoramidites were used: 5′-(4,4′-Dimethoxytrityl)-N6-(benzoyl)-2′,3′-seco-adenosine, 2′-benzoyl-3′-[(2-cyanoethyl)-(N,N-diisopropyl)]-phosphoramidite, 5′-(4,4′-Dimethoxytrityl)-N-acetyl-2′,3′-seco-cytosine, 2′-benzoyl-3′-[(2-cyanoethyl)-(N,N-diiso-propyl)]-phosphoramidite, 5′-(4,4′-Dimethoxytrityl)-N-isobutyryl-2′,3′-seco-guanosine, 2′-benzoyl-3′-[(2-cyanoethyl)-(N,N-diisopropyl)]-phosphoramidite, and 5′-(4,4′-Dimethoxy-trityl)-2′,3′-seco-uridine, 2′-benzoyl-3′-[(2-cyanoethyl)-(N,N-diiso-propyl)]-phosphoramidite. TFA aminolink phosphoramidites were also commercially purchased (ThermoFisher). Linker L6 was purchased as propargyl-PEGS-NHS from BroadPharm (catalog #BP-20907) and coupled to the NH₂-C₆ group from an aminolink phosphoramidite to form -L6-C6-, using standard coupling conditions. The linker Alk-cyHex was similarly commercially purchased from Lumiprobe (alkyne phosphoramidite, 5′-terminal) as a propargyl-containing compound phosphoramidite compound to form the linker -Alk-cyHex-. In each case, phosphorothioate linkages were introduced as specified using the conditions set forth herein. The cyclopropyl phosphonate phosphoramidites were synthesized in accordance with International Patent Application Publication No. WO 2017/214112 (see also Altenhofer et. al., Chem. Communications (Royal Soc. Chem.), 57(55):6808-6811 (July 2021)).

[0353] Tri-alkyne-containing phosphoramidites were dissolved in anhydrous dichloromethane or anhydrous acetonitrile (50 mM), while all other amidites were dissolved in anhydrous acetonitrile (50 mM) and molecular sieves (3 Å) were added. 5-Benzylthio-1H-tetrazole (BTT, 250 mM in acetonitrile) or 5-Ethylthio-1H-tetrazole (ETT, 250 mM in acetonitrile) was used as activator solution. Coupling times were 10 minutes (RNA), 90 seconds (2′ O-Me), and 60 seconds (2′ F). In order to introduce phosphorothioate linkages, a 100 mM solution of 3-phenyl 1,2,4-dithiazoline-5-one (POS, obtained from PolyOrg, Inc., Leominster, MA, USA) in anhydrous acetonitrile was employed.

[0354] Alternatively, tri-alkyne moieties were introduced post-synthetically (see section E, below). For this route, the sense strand was functionalized with a 5′ and/or 3′ terminal nucleotide containing a primary amine. TFA aminolink phosphoramidite was dissolved in anhydrous acetonitrile (50 mM) and molecular sieves (3 Å) were added. 5-Benzylthio-1H-tetrazole (BTT, 250 mM in acetonitrile) or 5-Ethylthio-1H-tetrazole (ETT, 250 mM in acetonitrile) was used as activator solution. Coupling times were 10 minutes (RNA), 90 seconds (2′ O-Me), and 60 seconds (2′ F). In order to introduce phosphorothioate linkages, a 100 mM solution of 3-phenyl 1,2,4-dithiazoline-5-one (POS, obtained from PolyOrg, Inc., Leominster, MA, USA) in anhydrous acetonitrile was employed.

[0355] B. Cleavage and deprotection of support bound oligomer. After finalization of the solid phase synthesis. the dried solid support was treated with a 1:1 volume solution of 40 wt. % methylamine in water and 28% to 31% ammonium hydroxide solution (Aldrich) for 1.5 hours at 30° C. The solution was evaporated and the solid residue was reconstituted in water (see below).

[0356] C. Purfication. Crude oligomers were purified by anionic exchange HPLC using a TSKgel SuperQ-5PW 13 μm column and Shimadzu LC-8 system. Buffer A was 20 mM Tris, 5 mM EDTA, pH 9.0 and contained 20% Acetonitrile and buffer B was the same as buffer A with the addition of 1.5 M sodium chloride. UV traces at 260 nm were recorded. Appropriate fractions were pooled then run on size exclusion HPLC using a GE Healthcare XK 16/40 column packed with Sephadex G-25 fine with a running buffer of 100 mM ammonium bicarbonate, pH 6.7 and 20% Acetonitrile or filtered water. Alternatively, pooled fractions were desalted and exchanged into an appropriate buffer or solvent system via tangential flow filtration.

[0357] D. Annealing. Complementary strands were mixed by combining equimolar RNA solutions (sense and antisense) in 1×PBS (Phosphate-Buffered Saline, 1×, Corning, Cellgro) to form the RNAi agents. Some RNAi agents were lyophilized and stored at −15 to −25° C. Duplex concentration was determined by measuring the solution absorbance on a UV-Vis spectrometer in 1×PBS. The solution absorbance at 260 nm was then multiplied by a conversion factor (0.050 mg/(mL-cm)) and the dilution factor to determine the duplex concentration.

### E. Synthesis of Antibody-siRNA Linkers

[0358] The synthesis of various Fab linkers used throughout the present application are provided below.

Synthesis of 2,3,5,6-tetrafluorophenyl 16-((3,5-bis(5-(methylsulfonyl)-1,3,4-oxadiazol-2-yl)phenyl)amino)-16-oxo-4,7,10,13-tetraoxahexadecanoate (i.e., I-1026-p)

[chemical structure]

[0359] Compound 6 (2.35 g, 7.31 mmol; prepared according to Sarbisheh et al. Bioconjugate Chemistry 2020 31 (12), 2789-2806), EDC-HCl (2.38 g, 12.43 mmol), and K-Oxyma (2.50 g, 13.9 mmol) were combined as solids and slurried in DMF (190 mL) under N2 at ambient temperature. Compound 7 (1.92 g, 5.48 mmol) was added as a solution in DMF (10 mL). After 5 m, triethylamine (4.5 mL, 32.2 mmol) was added dropwise at ambient temperature. The reaction mixture was heated at 50° C. for 2 days. The reaction mixture was concentrated under reduced pressure to a red oil which was slurried in DCM (250 mL) and washed with sat. aq. sodium bicarbonate (200 mL). The layers were separated, and the aqueous layer was further extracted with DCM (100 mL). The combined organic phase was washed with water (200 mL) and brine (200 mL). The organic phase was dried over sodium sulfate, filtered, and concentrated. The residue was purified by normal phase SiO₂ chromatography with a gradient of ethyl acetate in DCM (0-100%). Yield of compound 8: 1.77 g (49%), partially contaminated with compound 6. Calculated mw for compound 8: 653.77 g/mol, found m/z (ESI, positive mode): 654.83.

[chemical structure]

[0360] Compound 8 (1.77 g, 2.71 mmol) was dissolved in TFA:DCM [1:1] (18 mL) and stirred at ambient temperature for 1 hour. The reaction mixture was concentrated under reduced pressure then co-evaporated with toluene (3×30 mL). The residue was purified by normal phase SiO₂ chromatography with a gradient of DCM containing 0.1% formic acid and methanol (0-7%). Yield of compound 9: 1.30 g (80%). Calculated mw for compound 9: 597.66 g/mol, found m/z (ESI, positive mode): 598.79.

[chemical structure]

[0361] Compound 9 (1.30 g, 2.18 mmol) was dissolved in DCM (50 mL) and cooled to 0° C. A 100 mg/mL solution of m-CPBA solution was prepared by dissolving 10.38 g m-CPBA (77 wt %) in 80 mL DCM and drying with sodium sulfate until clear. To the solution of compound 9 was added 58 mL m-CPBA (5.85 g, 26.1 mmol) dropwise at 0° C. The reaction mixture was warmed to ambient temperature and allowed to proceed overnight. The reaction mixture was concentrated, slurried in DCM 0.1% formic acid (50 mL), and filtered. The filtrate was purified by normal phase SiO₂ chromatography with a gradient of DCM containing 0.1% formic acid and methanol (0-10%). Yield of compound 10: 1.03 g (72%). Calculated mw for compound 10: 661.65 g/mol, found m/z (ESI, positive mode): 662.65.

[chemical structure]

[0362] To a solution of compound 10 (1.03 g, 1.56 mmol) in DCM:ACN [4:1] (15 mL) at 0° C. was added EDC (0.448 g, 2.34 mmol) followed by a solution of TFP (0.310 g, 1.87 mmol) in DCM:ACN [4:1] (5 mL). After 5 m, the reaction mixture was warmed to ambient temperature. After 1.5 h, the reaction mixture was concentrated to dryness. The crude was purified by preparative reverse phase HPLC (Phenomenex Gemini C18 50 mm×250 mm, 10 um) using a gradient of water/acetonitrile containing 0.1% TFA. Product-containing fractions were concentrated under reduced pressure. Yield of L-1026-p: 1.10 g (87%). Calculated mw for compound L-1026-p: 809.71 g/mol, found m/z (ESI, positive mode): 810.62. ¹H NMR (400 MHz, [D₆]DMSO, 25° C.): δ=2.64 (t, 2H), 3.00 (t, 2H), 3.49 (m, 12H), 3.74 (m, 10H), 7.92 (m, 1H), 8.34 (t, 1H), 8.68 (d, 2H), 10.67 (s, 1H).

### Synthesis of L20-p

[chemical structure]

[0363] To a suspension of compound 1 (5.00 g, 22.50 mmol) and Cs₂CO₃ (25.66 g, 78.75 mmol) in anhydrous DMF (80 mL) was added methyl iodide (4.20 mL, 67.50 mmol) at room temperature. The reaction mixture was stirred at room temperature for 48 hours. The reaction mixture was quenched with water (200 mL) and the mixture was extracted with EtOAc (3×100 mL). The organic phase was combined and washed with water and brine. The organic layer was dried over anhydrous Na₂SO₄ and concentrated. Compound 2 was obtained as a light yellow solid, 5.41 g, 96%. Compound 2 was used directly without further purification. LC-MS: [M+H] calculated 251.05, found 251.18.

[chemical structure]

[0364] To a solution of compound 2 (5.41 g, 21.62 mmol) in THF/H2O (50 mL/50 mL) was added LiOH (2.59 g, 108.08 mmol) at room temperature. The reaction mixture was stirred at room temperature for 1 hour. After removing THE under vacuum, the pH was adjusted to ˜2 by [C] HCl. Then EtOAc (3×60 mL) was used to extract. The organic layers were combined, washed with brine, then dried over anhydrous Na₂SO₄, and concentrated. Compound 3 was obtained as an off-white solid, 5 g, 98%. Compound 3 was used directly without further purification. LC-MS: calculated [M+H] 237.03, found 237.26.

[chemical structure]

[0365] To a solution of compound 3 (5.81 g, 24.60 mmol) in THF/DMF (80 mL/20 mL) was added EDC (7.07 g, 36.90 mmol), DMAP (0.30 g, 2.46 mmol) and compound 4 (6.13 g, 36.90 mmol) at room temperature. The reaction mixture was stirred at room temperature overnight. After removing solvent under vacuum, the residue was loaded on a 120 g column and compound 5 was eluted with 0-50% EtOAc in hexanes. Compound 5 was obtained as a white solid, 9.36 g, 99%. LC-MS: calculated [M+H] 385.03, found 385.46.

[chemical structure]

[0366] To a solution of compound 5 (2.29 g, 5.96 mmol) in DCM (110 mL) was added 70% m-CPBA (5.14 g, 27.79 mmol) at 0° C. The reaction mixture was stirred at room temperature for 6 hours. Another 1.8 g m-CPBA was added at room temperature. The reaction mixture was stirred at room temperature overnight. After filtration, the solvent was removed under vacuum. The residue was recrystallized from DCM/EtOAc (50 mL/50 mL) twice. Compound L20-p was obtained as white needle crystals, 1.93 g, 78%. LC-MS: calculated [M+H] 417, found 417.

### F. Conjugation of RNAi Agents to Fabs.

[0367] RNAi agents described herein comprising a free amine were conjugated to L20-p

[chemical structure]

using standard amide reaction chemistry following cleavage from the solid phase. To a solution of Fab in PBS (0.2 umol, 1.0-10.0 mg/mL in PBS) was added a freshly prepared solution of (tris(2-carboxyethyl)phosphine) hydrochloride (TCEP-HCl) in PBS (5-20 eq, 70 mM). The reaction was held overnight at room temperature and covered from light. The next day, TCEP was removed by loading the reaction mixture on a PD-10 desalting column equilibrated with PBS and eluted with PBS. The concentration of Fab in the eluate was determined using the theoretical absorptivity factor at 280 nm. A solution of L20-modified sense strand in sodium phosphate buffer was prepared, and the concentration was determined using the theoretical absorptivity factor at 260 nm. To the desalted Fab solution was added L20-modified sense strand (1-1.3 eq, 0.5-2.5 mM), and the reaction was mixed end-over-end. Analysis by SEC Method 1 and AIEX Method 1 show a mixture of starting Fab, DAR1, and DAR2. After 1 hour, a solution of CP-1113-p (see Table 10 for structure) in DMSO and added to the reaction mixture (3 eq, 36 mM). After 1 hour, a solution of L-cysteine in PBS was added to the reaction mixture (6-10 eq, 165 mM). Finally, the conjugate was annealed by addition of antisense strand (1.2-1.5 eq, 0.5-2.5 mM). The conjugate was purified by an AKTA Pure FPLC system equipped with 20 mM tris pH 8 (Buffer A), 20 mM tris 1500 mM NaCl (Buffer B), and a 5×200 mm column packed with Tosoh SuperQ 5PW (20 micron). The crude reaction mixture was pump loaded onto the column and eluted with a gradient of 10-40% Buffer B. DAR1 and DAR2 fractions were differentiated by SEC Method 1, AEX Method 1, and Nanodrop 260/280 readings. DAR1 fractions were pooled and buffer exchanged to PBS using a PD-10 desalting column. The purified conjugate was analyzed by SEC Method 1 and eluted as a monomeric peak with a retention time of 13.2 minutes.

### SEC Method 1

| | |
|---|---|
| Mobile phases | Phosphate Buffered Saline pH 7.4 |
| Column | Superdex 200 Increase 10/300 GL |
| | Cytiva PN 29219757 |
| Column | 25° C. |
| temperature | |
| Autosampler | ambient |
| Injection volume | 40 uL of 1 mg/mL protein (variable) |
| Flow rate | 1.0 mL/min isocratic |
| Wavelength | PDA 190-450 nm; monitor 230 nm, 260 nm, 280 nm |
| Run time | 30 minutes |

### AIEX Method 1

| Mobile phases | C: 20 mM tris pH 8.0, D: 20 mM tris 1500 | | |
|---|---|---|---|
| | mM NaCl pH 8.0 | | |
| Column | ProPac SAX-10 4 mm × 250 mm, 10 um | | |
| | Thermo Fisher Scientific PN 054997 | | |
| Column | 30° C. | | |
| temperature | | | |
| Autosampler | 5° C. | | |
| Injection volume | 20 μl of 0.2 mg/mL oligo (variable) | | |
| Flow rate | 1.0 mL/min (variable) | | |
| Wavelength | PDA 190-450 nm; monitor 230 nm, 260 nm, 280 nm | | |
| Run time | 12.5 minutes | | |
| | Time(min) | Event | Value |
| Gradient | 0 | D. Conc | 0 |
| | 0.10 | D. Conc | 0 |
| | 0.11 | D. Conc | 25 |
| | 10.11 | D. Conc | 75 |
| | 10.11 | T. Flow | 1 |
| | 10.12 | D. Conc | 0 |
| | 10.12 | T. Flow | 1.5 |
| | 12.50 | Controller | Stop |

[0368] RNAi agents described herein comprising a free amine were conjugated to L1026-p:

[chemical structure]

following cleavage from the solid phase according to the following procedure:

[0369] To a solution of Fab0070 (28 mg, 0.59 umol, 5.55 mg/mL in PBS) was added a freshly prepared solution of TCEP-HCl in PBS (5 eq, 70 mM, 42 uL). The reduction was mixed end-over-end at ambient temperature for 15 minutes then held at 5° C. overnight without agitation. The next day, TCEP was removed by loading the reaction mixture on two PD-10 desalting columns (Cytiva) equilibrated with 20 mM tris 50 mM NaCl pH 7.6 (alternatively, 20 mM tris pH 8 or PBS buffer can be used) and eluted with the same buffer. The concentration of the Fab in the eluate was determined using the theoretical absorptivity factor at 280 nm. A solution of L-1026-modified sense strand (CS915332) in 10 mM sodium phosphate buffer pH 6.0-6.5 was prepared, and the concentration was determined using the theoretical absorptivity factor at 260 nm. To the desalted Fab solution was added L-1026-modified C5915332 (1.15 eq, 2.75 mM, 240 uL), and the reaction was mixed end-over-end at ambient temperature. Analysis by SEC Method 1 and ALEX Method 1 show a mixture of starting Fab0070, DAR1 product, and DAR2 product. After 30 m, a solution of L-cysteine in 20 mM tris 50 mM NaCl pH 7.6 (alternatively, some L-1026 conjugates have been prepared in 20 mM tris pH 8 or PBS buffer solutions) was added to the reaction mixture (10 eq, 165 mM, 36 uL). After 30 m, the conjugate was annealed by addition of antisense strand (CA003820) (1.3 eq, 1.45 mM in water, 529 uL). The conjugate was purified by an AKTA Pure FPLC system equipped with 20 mM tris pH 8 (Buffer A), 20 mM tris 1500 mM NaCl (Buffer B), and a 5×200 mm column packed with Tosoh SuperQ 5PW (20 micron). The crude reaction mixture was loaded onto the column and eluted with a gradient of 10-40% Buffer B. DAR1 and DAR2 fractions were differentiated by SEC Method 1, ALEX Method 1, and UV-Vis 260/280 measurements. DAR1 fractions were pooled and buffer exchanged to PBS using two PD-10 columns. The purified conjugate was analyzed by SEC Method 1 and eluted as a monomeric peak with a retention time of 7.2 minutes.

### SEC Method 1

| | |
|---|---|
| Mobile phases | 2x Phosphate Buffered Saline pH 7.4 |
| Column | ACQUITY UPLC Protein BEH SEC Column, 200 Å, |
| | 1.7 μm, 4.6 mm × 300 mm |
| | Waters PN 186005226 |
| Column | 30° C. |
| temperature | |
| Autosampler | ambient |
| Injection volume | 2-5 uL |
| Flow rate | 0.3 mL/min |
| Wavelength | PDA 190-450 nm |
| Run time | 20 minutes |

### AIEX Method 1

| Mobile phases | C: 20 mM tris pH 8.0, D: 20 mM tris 1500 | | |
|---|---|---|---|
| | mM NaCl pH 8.0 | | |
| Column | ProPac SAX-10 4 mm × 250 mm, 10 um | | |
| | Thermo Fisher Scientific PN 054997 | | |
| Column | 30° C. | | |
| temperature | | | |
| Autosampler | 5° C. | | |
| Injection volume | 5-20 μl | | |
| Flow rate | 1.0 mL/min (variable) | | |
| Wavelength | PDA 190-450 nm | | |
| Run time | 12.5 minutes | | |
| | Time(min) | Event | Value |
| Gradient | 0 | D. Conc | 10 |
| | 0.10 | D. Conc | 10 |
| | 0.11 | D. Conc | 25 |
| | 10.11 | D. Conc | 75 |
| | 10.11 | T. Flow | 1 |
| | 10.12 | D. Conc | 10 |
| | 10.12 | T. Flow | 1.5 |
| | 12.50 | Controller | Stop |

### Example 2. Synthesis of Lipids

### Synthesis of LP-183 Phosphoramidite

[chemical structure]

[0370] To a solution of compound 2 (2.00 g) in DCM was added TEA (2.27 mL) followed by compound 1 (4.931 g) dropwise at room temperature. Then the mixture was stirred at room temperature for 2 h. The mixture was then filtered. The white solid was dried overnight. Product is as white solid, yield, 4.267 g, 74%. LC-MS: calculated [M+H] 356.35, found 356.63.

[chemical structure]

[0371] To a mixture of compound 1 (2.54 g) in 120 mL DCM was added compound 3 (0.61 g) followed by compound 2 (5.37 g) dropwise at room temperature. Then the mixture was stirred at room temperature overnight. 5 mL TEA was added followed by Celite. After removing solvent in vacuo, the residue was loaded on a 40 g column by dry method. Hexanes (2% TEA) to 50% EtOAc (2% TEA) in Hexanes (2% TEA) as gradient was used to purify the product. Product is a white waxy solid, yield 3.462 g, 87%. LC-MS: calculated [M+H] 556.46, found 556.64.

### Synthesis of LP-293 Phosphoramidite

[chemical structure]

[0372] To a solution of compound 1 (73 mg), NEt₃ (0.112 mL), and COMU (126 mg) in DMF was added compound 2 (48.9 mg) under ambient conditions. The reaction was stirred until full conversion was observed by LC-MS. Conversion was not able to be clearly observed by LC-MS, and instead, reaction was allowed to stir for 30 min. until bright yellow color (before the addition of compound 2) transitioned to a honey orange color and all material was observed to be mainly dissolved. The reaction mixture was then washed with water, extracted with DCM, dried over Na₂SO₄, filtered, and concentrated under vacuum. The residue was purified by CombiFlash® via DCM liquid-load onto a 12-g column with a gradient hexanes to 100% EtOAc in which product eluted at 30% B. The product was concentrated under vacuum to provide a white solid residue and confirmed by 1H NMR in CDCl₃.

### Conjugation of Lipid PK/PD Modulator Precursors

[0373] Either prior to or after annealing, one or more lipid PK/PD modulator precursors can be linked to the RNAi agents disclosed herein. The following describes the general conjugation process used to link lipid PK/PD modulator precursors to the constructs set forth in the Examples depicted herein.

### A. Conjugation of Activated Ester PK/PD Modulators

[0374] The following procedure was used to conjugate PK/PD modulators having an activated ester moiety such as TFP (tetrafluorophenoxy) or PNP (para-nitrophenol) to an RNAi agent with an amine-functionalized sense strand, such as C6-NH2, NH2-C6, or (NH2-C6). An annealed RNAi Agent dried by lyophilization was dissolved in DMSO and 10% water (v/v %) at 25 mg/mL. Then 50-100 equivalents of TEA and 3 equivalents of activated ester PK/PD modulator were added to the solution. The solution was allowed to react for 1-2 hours, while monitored by RP-HPLC-MS (mobile phase A 100 mM HFIP, 14 mM TEA; mobile phase B: acetonitrile on an Waters™ XBridge C18 column, Waters Corp.)

[0375] The product was then precipitated by adding 12 mL acetonitrile and 0.4 mL PBS and centrifuging the solid to a pellet. The pellet was then re-dissolved in 0.4 mL of 1×PBS and 12 mL of acetonitrile. The resulting pellet was dried on high vacuum for one hour.

### B. Conjugation of Phosphoramidite PK/PD Modulators

[0376] PK/PD modulators having a phosphoramidite moiety may be attached on resin using typical oligonucleotide manufacturing conditions.

### C. Hydrolysis of PK/PD Modulators

[0377] Certain PK/PD modulators are hydrolyzed in the cleavage and deprotection conditions described in Example 1, above.

### Example 3. In Vivo Administration of HTT RNAi Agents in YAC128 Mice

[0378] HTT RNAi agents were evaluated in vivo in mice. On Day 1, four (n=4) FVB-Tg(YAC128)53Hay/J mice (2 male, 2 female) for each group were dosed, via intracerebroventricular (ICV) injection, with HTT RNAi agents formulated in artificial cerebrospinal fluid (aCSF) (at 0.1 mg total HTT RNAi agent) or with aCSF. The HTT RNAi agents were formulated at 10 mg/mL at 10 μL total injection volume. The dosing was in accordance with the following Table 11.

[0379] FVB-Tg(YAC 128)53Hay/J mice (common name: “YAC 128” mice) express the human huntingtin protein.

TABLE 11
Dosing for mice of Example 3.

| Group ID | Dose (RNAi Agent) | # of Animals |
|---|---|---|
| 1. aCSF | Day 1: Single ICV Injection | n = 4 |
| 2. Naive | No Injection | n = 4 |
| 3. 0.1 mg AC911294 | Day 1: Single ICV Injection | n = 4 |
| 4. 0.1 mg AC911295 | Day 1: Single ICV Injection | n = 4 |
| 5. 0.1 mg AC911296 | Day 1: Single ICV Injection | n = 4 |
| 6. 0.1 mg AC911297 | Day 1: Single ICV Injection | n = 4 |
| 7. 0.1 mg AC911298 | Day 1: Single ICV Injection | n = 4 |
| 8. 0.1 mg AC911299 | Day 1: Single ICV Injection | n = 4 |
| 9. 0.1 mg AC911300 | Day 1: Single ICV Injection | n = 4 |
| 10. 0.1 mg AC911301 | Day 1: Single ICV Injection | n = 4 |
| 11. 0.1 mg AC911303 | Day 1: Single ICV Injection | n = 4 |
| 12. 0.1 mg AC911304 | Day 1: Single ICV Injection | n = 4 |

[0380] Each of the HTT RNAi agents included modified nucleotides that were conjugated at the 5′ terminal end of the sense strand to a targeting ligand that included a lipid moiety or antigen binding moiety having the modified sequences as set forth in the duplex structures herein. (See Tables 3, 4, 5, 6, 7, 8, 9, and 10 for specific modifications and structure information related to the HTT RNAi agents, including the lipid and antigen binding moieties).

[0381] On Day 8, the mice were euthanized. From the mice, right half of the brain and thoracic spinal cord were harvested and collected for analysis. hHTT expression was analyzed via qPCR in the cortex, thoracic spinal cord, and cerebellum, with mPPIA as endogenous gene, normalized to Group 1 mice dosed with aCSF. The hHTT expression data is shown in the following Table 12.

TABLE 12
HTT expression in mice brain tissues of Example 3.

| | Day 8 | | | | | | | | |
|---|---|---|---|---|---|---|---|---|---|
| | Cortex | | | Thoracic Spinal Cord | | | Cerebellum | | |
| | Rel Exp | Error | Error | Rel Exp | Error | Error | Rel Exp | Error | Error |
| Group ID | HTT | Low | High | HTT | Low | High | HTT | Low | High |
| 1. aCSF | 1.000 | 0.068 | 0.073 | 1.000 | 0.165 | 0.198 | 1.000 | 0.095 | 0.105 |
| 2. Naive | 1.157 | 0.105 | 0.116 | 0.833 | 0.160 | 0.198 | 1.167 | 0.141 | 0.160 |
| 3. 0.1 mg AC911294 | 1.013 | 0.132 | 0.151 | 0.989 | 0.100 | 0.111 | 1.085 | 0.090 | 0.098 |
| 4. 0.1 mg AC911295 | 0.984 | 0.073 | 0.079 | 1.000 | 0.108 | 0.122 | 1.318 | 0.153 | 0.172 |
| 5. 0.1 mg AC911296 | 0.649 | 0.125 | 0.154 | 0.668 | 0.048 | 0.052 | 0.912 | 0.041 | 0.043 |
| 6. 0.1 mg AC911297 | 0.703 | 0.071 | 0.079 | 0.869 | 0.085 | 0.095 | 1.124 | 0.191 | 0.231 |
| 7. 0.1 mg AC911298 | 0.662 | 0.062 | 0.068 | 0.757 | 0.080 | 0.089 | 1.167 | 0.116 | 0.129 |
| 8. 0.1 mg AC911299 | 0.771 | 0.111 | 0.130 | 0.708 | 0.052 | 0.056 | 1.257 | 0.221 | 0.269 |
| 9. 0.1 mg AC911300 | 0.477 | 0.078 | 0.093 | 0.642 | 0.068 | 0.076 | 1.107 | 0.149 | 0.172 |
| 10. 0.1 mg AC911301 | 0.750 | 0.078 | 0.087 | 0.884 | 0.142 | 0.169 | 1.359 | 0.175 | 0.201 |
| 11. 0.1 mg AC911303 | 0.509 | 0.051 | 0.056 | 0.544 | 0.103 | 0.127 | 1.105 | 0.159 | 0.185 |
| 12. 0.1 mg AC911304 | 0.775 | 0.150 | 0.185 | 0.549 | 0.036 | 0.038 | 1.317 | 0.204 | 0.241 |

[0382] In the cortex, Groups 5-12 showed reduction in HTT transcripts, while Groups 2-4 showed negligible to no reduction. In the thoracic spinal cord, Groups 5 and 7-12 showed reduction in HTT transcripts, while Groups 2-4 and 6 showed negligible to no reduction. In the cerebellum, all of the test Groups 2-12 showed negligible to no reduction in HTT transcripts. Most notably, a single dose 0.1 mg AC911300 achieved ˜52% HTT transcript inhibition (0.477) in the cortex.

### Example 4. In Vivo Administration of HTT RNAi Agents in YAC128 Mice

[0383] HTT RNAi agents were evaluated in vivo in mice. On Day 1, four (n=4) FVB-Tg(YAC128)53Hay/J mice (2 male, 2 female) for each group were dosed, via intracerebroventricular (ICV) injection, with HTT RNAi agents formulated in artificial cerebrospinal fluid (aCSF) (at 0.1 mg total HTT RNAi agent) or with aCSF. The HTT RNAi agents were formulated at 10 mg/mL at 10 μL total injection volume. The dosing was in accordance with the following Table 13.

[0384] FVB-Tg(YAC 128)53Hay/J mice (common name: “YAC 128” mice) express the human huntingtin protein.

TABLE 13
Dosing for mice of Example 4.

| Group ID | Dose (RNAi Agent) | # of Animals |
|---|---|---|
| 1. aCSF | Day 1: Single ICV Injection | n = 4 |
| 2. 0.1 mg AC911227 | Day 1: Single ICV Injection | n = 4 |
| 3. 0.1 mg AC911302 | Day 1: Single ICV Injection | n = 4 |
| 4. 0.1 mg AC911305 | Day 1: Single ICV Injection | n = 4 |
| 5. 0.1 mg AC911306 | Day 1: Single ICV Injection | n = 4 |
| 6. 0.1 mg AC911307 | Day 1: Single ICV Injection | n = 4 |
| 7. 0.1 mg AC911308 | Day 1: Single ICV Injection | n = 4 |
| 8. 0.1 mg AC911309 | Day 1: Single ICV Injection | n = 4 |
| 9. 0.1 mg AC911310 | Day 1: Single ICV Injection | n = 4 |
| 10. 0.1 mg AC911311 | Day 1: Single ICV Injection | n = 4 |
| 11. 0.1 mg AC911312 | Day 1: Single ICV Injection | n = 4 |
| 12. 0.1 mg AC911313 | Day 1: Single ICV Injection | n = 4 |
| 13. 0.1 mg AC911314 | Day 1: Single ICV Injection | n = 4 |

[0385] Each of the HTT RNAi agents included modified nucleotides that were conjugated at the 5′ terminal end of the sense strand to a targeting ligand that included a lipid moiety or antigen binding moiety having the modified sequences as set forth in the duplex structures herein. (See Tables 3, 4, 5, 6, 7, 8, 9, and 10 for specific modifications and structure information related to the HTT RNAi agents, including the lipid and antigen binding moieties).

[0386] On Day 8, the mice were euthanized. From the mice, right half of the brain and thoracic spinal cord were harvested and collected for analysis. hHTT expression was analyzed via qPCR in the cortex, thoracic spinal cord, and cerebellum, with mPPIA as endogenous gene, normalized to Group 1 mice dosed with aCSF. The hHTT expression data is shown in the following Table 14.

TABLE 14
HTT expression in mice brain tissues of Example 4.

| | Day 8 | | | | | | | | |
|---|---|---|---|---|---|---|---|---|---|
| | Cortex | | | Thoracic Spinal Cord | | | Cerebellum | | |
| | Rel Exp | Error | Error | Rel Exp | Error | Error | Rel Exp | Error | Error |
| Group ID | HTT | Low | High | HTT | Low | High | HTT | Low | High |
| 1. aCSF | 1.000 | 0.227 | 0.293 | 1.000 | 0.151 | 0.178 | 1.000 | 0.238 | 0.313 |
| 2. 0.1 mg AC911227 | 0.805 | 0.186 | 0.242 | 0.760 | 0.139 | 0.171 | 0.562 | 0.105 | 0.129 |
| 3. 0.1 mg AC911302 | 0.879 | 0.102 | 0.115 | 0.982 | 0.129 | 0.148 | 0.722 | 0.105 | 0.123 |
| 4. 0.1 mg AC911305 | 0.834 | 0.141 | 0.170 | 0.817 | 0.123 | 0.144 | 0.760 | 0.260 | 0.395 |
| 5. 0.1 mg AC911306 | 0.805 | 0.165 | 0.208 | 0.947 | 0.093 | 0.103 | 0.557 | 0.120 | 0.152 |
| 6. 0.1 mg AC911307 | 0.918 | 0.124 | 0.143 | 0.862 | 0.091 | 0.102 | 0.506 | 0.152 | 0.216 |
| 7. 0.1 mg AC911308 | 0.522 | 0.152 | 0.214 | 0.561 | 0.078 | 0.091 | 0.595 | 0.073 | 0.083 |
| 8. 0.1 mg AC911309 | 0.815 | 0.125 | 0.147 | 0.915 | 0.131 | 0.154 | 0.662 | 0.114 | 0.138 |
| 9. 0.1 mg AC911310 | 0.515 | 0.067 | 0.078 | 0.713 | 0.081 | 0.092 | 0.789 | 0.105 | 0.121 |
| 10. 0.1 mg AC911311 | 0.492 | 0.026 | 0.028 | 0.631 | 0.093 | 0.109 | 0.547 | 0.068 | 0.077 |
| 11. 0.1 mg AC911312 | 0.554 | 0.119 | 0.152 | 0.680 | 0.074 | 0.083 | 0.559 | 0.099 | 0.121 |
| 12. 0.1 mg AC911313 | 0.566 | 0.180 | 0.263 | 0.753 | 0.162 | 0.207 | 0.847 | 0.233 | 0.321 |
| 13. 0.1 mg AC911314 | 0.685 | 0.149 | 0.190 | 0.790 | 0.118 | 0.138 | 0.775 | 0.216 | 0.300 |

[0387] In the cortex, Groups 7 and 9-13 showed reduction in HTT transcripts, while Groups 2-6 and 8 showed negligible to no reduction. In the thoracic spinal cord, Groups 2, 7, and 9-13 showed reduction in HTT transcripts, while Groups 3-6 and 8 showed negligible to no reduction. In the cerebellum, Groups 2-11 and 13 showed reduction in HTT transcripts, while Group 12 showed negligible to no reduction. Most notably, a single dose 0.1 mg AC911311 achieved ˜51% HTT transcript inhibition (0.492) in the cortex.

### Example 5. In Vivo Administration of HTT RNAi Agents in YAC128 Mice

[0388] HTT RNAi agents were evaluated in vivo in mice. On Day 1, four (n=4) FVB-Tg(YAC128)53Hay/J mice (2 male, 2 female) for each group were dosed, via intracerebroventricular (ICV) injection, with HTT RNAi agents formulated in artificial cerebrospinal fluid (aCSF) (at 0.1 mg total HTT RNAi agent) or with aCSF. The HTT RNAi agents were formulated at 10 mg/mL at 10 μL total injection volume. The dosing was in accordance with the following Table 15.

[0389] FVB-Tg(YAC 128)53Hay/J mice (common name: “YAC 128” mice) express the human huntingtin protein.

TABLE 15
Dosing for mice of Example 5.

| Group ID | Dose (RNAi Agent) | # of Animals |
|---|---|---|
| 1. aCSF | Day 1: Single ICV Injection | n = 4 |
| 2. 0.1 mg AC911227 | Day 1: Single ICV Injection | n = 4 |
| 3. 0.1 mg AC911290 | Day 1: Single ICV Injection | n = 4 |
| 4. 0.1 mg AC911291 | Day 1: Single ICV Injection | n = 4 |
| 5. 0.1 mg AC911292 | Day 1: Single ICV Injection | n = 4 |
| 6. 0.1 mg AC911293 | Day 1: Single ICV Injection | n = 4 |
| 7. 0.1 mg AC911315 | Day 1: Single ICV Injection | n = 4 |
| 8. 0.1 mg AC911316 | Day 1: Single ICV Injection | n = 4 |
| 9. 0.1 mg AC911317 | Day 1: Single ICV Injection | n = 4 |
| 10. 0.1 mg AC911318 | Day 1: Single ICV Injection | n = 4 |
| 11. 0.1 mg AC911319 | Day 1: Single ICV Injection | n = 4 |
| 12. 0.1 mg AC911320 | Day 1: Single ICV Injection | n = 4 |
| 13. 0.1 mg AC911321 | Day 1: Single ICV Injection | n = 4 |

[0390] Each of the HTT RNAi agents included modified nucleotides that were conjugated at the 5′ terminal end of the sense strand to a targeting ligand that included a lipid moiety or antigen binding moiety having the modified sequences as set forth in the duplex structures herein. (See Tables 3, 4, 5, 6, 7, 8, 9, and 10 for specific modifications and structure information related to the HTT RNAi agents, including the lipid and antigen binding moieties).

[0391] On Day 8, the mice were euthanized. From the mice, right half of the brain and thoracic spinal cord were harvested and collected for analysis. hHTT expression was analyzed via qPCR in the cortex, thoracic spinal cord, and cerebellum, with mPPIA as endogenous gene, normalized to Group 1 mice dosed with aCSF. The hHTT expression data is shown in the following Table 16.

TABLE 16
HTT expression in mice brain tissues of Example 5.

| | Day 8 | | | | | | | | |
|---|---|---|---|---|---|---|---|---|---|
| | Cortex | | | Thoracic Spinal Cord | | | Cerebellum | | |
| | Rel Exp | Error | Error | Rel Exp | Error | Error | Rel Exp | Error | Error |
| Group ID | HTT | Low | High | HTT | Low | High | HTT | Low | High |
| 1. aCSF | 1.000 | 0.111 | 0.125 | 1.000 | 0.160 | 0.190 | 1.000 | 0.140 | 0.163 |
| 2. 0.1 mg AC911227 | 0.560 | 0.117 | 0.148 | 0.751 | 0.061 | 0.066 | 0.707 | 0.120 | 0.144 |
| 3. 0.1 mg AC911290 | 0.595 | 0.108 | 0.132 | 0.804 | 0.114 | 0.133 | 0.895 | 0.136 | 0.161 |
| 4. 0.1 mg AC911291 | 0.530 | 0.080 | 0.094 | 0.901 | 0.120 | 0.138 | 0.785 | 0.090 | 0.101 |
| 5. 0.1 mg AC911292 | 0.607 | 0.109 | 0.134 | 1.011 | 0.138 | 0.160 | 0.617 | 0.129 | 0.163 |
| 6. 0.1 mg AC911293 | 0.481 | 0.076 | 0.091 | 0.816 | 0.144 | 0.175 | 0.446 | 0.047 | 0.052 |
| 7. 0.1 mg AC911315 | 0.400 | 0.090 | 0.116 | 0.595 | 0.225 | 0.363 | 0.473 | 0.120 | 0.161 |
| 8. 0.1 mg AC911316 | 0.332 | 0.037 | 0.041 | 0.580 | 0.058 | 0.064 | 0.560 | 0.184 | 0.274 |
| 9. 0.1 mg AC911317 | 0.317 | 0.099 | 0.145 | 0.582 | 0.121 | 0.152 | 0.433 | 0.106 | 0.140 |
| 10. 0.1 mg AC911318 | 0.309 | 0.030 | 0.033 | 0.679 | 0.073 | 0.081 | 0.648 | 0.119 | 0.146 |
| 11. 0.1 mg AC911319 | 0.289 | 0.024 | 0.026 | 0.562 | 0.048 | 0.052 | 0.418 | 0.143 | 0.217 |
| 12. 0.1 mg AC911320 | 0.430 | 0.069 | 0.083 | 0.651 | 0.090 | 0.104 | 0.778 | 0.131 | 0.158 |
| 13. 0.1 mg AC911321 | 0.394 | 0.021 | 0.022 | 0.683 | 0.102 | 0.120 | 0.695 | 0.043 | 0.046 |

[0392] In the cortex, Groups 2-13 showed reduction in HTT transcripts. In the thoracic spinal cord, Groups 2 and 7-13 showed reduction in HTT transcripts, while Groups 3-6 showed negligible to no reduction. In the cerebellum, Groups 2 and 4-13 showed reduction in HTT transcripts, while Group 3 showed negligible to no reduction. Most notably, a single dose 0.1 mg AC911319 achieved ˜71% HTT transcript inhibition (0.289) in the cortex.

### Example 6. In Vivo Administration of HTT RNAi Agents in YAC128 Mice

[0393] HTT RNAi agents were evaluated in vivo in mice. On Day 1, four (n=4) FVB-Tg(YAC128)53Hay/J mice (2 male, 2 female) for each group were dosed, via intracerebroventricular (ICV) injection, with HTT RNAi agents formulated in artificial cerebrospinal fluid (aCSF) (at 0.1 mg total HTT RNAi agent) or with aCSF. The HTT RNAi agents were formulated at 10 mg/mL at 10 μL total injection volume. The dosing was in accordance with the following Table 17.

[0394] FVB-Tg(YAC 128)53Hay/J mice (common name: “YAC 128” mice) express the human huntingtin protein.

TABLE 17
Dosing for mice of Example 6.

| Group ID | Dose (RNAi Agent) | # of Animals |
|---|---|---|
| 1. aCSF | Day 1: Single ICV Injection | n = 4 |
| 2. 0.1 mg AC911227 | Day 1: Single ICV Injection | n = 4 |
| 3. 0.1 mg AC911290 | Day 1: Single ICV Injection | n = 4 |
| 4. 0.1 mg AC911291 | Day 1: Single ICV Injection | n = 4 |
| 5. 0.1 mg AC911292 | Day 1: Single ICV Injection | n = 4 |
| 6. 0.1 mg AC911293 | Day 1: Single ICV Injection | n = 4 |
| 7. 0.1 mg AC911300 | Day 1: Single ICV Injection | n = 4 |
| 8. 0.1 mg AC911303 | Day 1: Single ICV Injection | n = 4 |
| 9. 0.1 mg AC911308 | Day 1: Single ICV Injection | n = 4 |
| 10. 0.1 mg AC911311 | Day 1: Single ICV Injection | n = 4 |
| 11. 0.1 mg AC911312 | Day 1: Single ICV Injection | n = 4 |
| 12. 0.1 mg AC911315 | Day 1: Single ICV Injection | n = 4 |
| 13. 0.1 mg AC911316 | Day 1: Single ICV Injection | n = 4 |
| 14. 0.1 mg AC911317 | Day 1: Single ICV Injection | n = 4 |
| 15. 0.1 mg AC911318 | Day 1: Single ICV Injection | n = 4 |
| 16. 0.1 mg AC911319 | Day 1: Single ICV Injection | n = 4 |
| 17. 0.1 mg AC911320 | Day 1: Single ICV Injection | n = 4 |
| 18. 0.1 mg AC911599 | Day 1: Single ICV Injection | n = 4 |
| 19. 0.1 mg AC911600 | Day 1: Single ICV Injection | n = 4 |
| 20. 0.1 mg AC911601 | Day 1: Single ICV Injection | n = 4 |
| 21. 0.1 mg AC911602 | Day 1: Single ICV Injection | n = 4 |
| 22. 0.1 mg AC911603 | Day 1: Single ICV Injection | n = 4 |

[0395] Each of the HTT RNAi agents included modified nucleotides that were conjugated at the 5′ terminal end of the sense strand to a targeting ligand that included a lipid moiety or antigen binding moiety having the modified sequences as set forth in the duplex structures herein. (See Tables 3, 4, 5, 6, 7, 8, 9, and 10 for specific modifications and structure information related to the HTT RNAi agents, including the lipid and antigen binding moieties).

[0396] On Day 8, the mice were euthanized. From the mice, right half of the brain and thoracic spinal cord were harvested and collected for analysis. hHTT expression was analyzed via qPCR in the cortex, thoracic spinal cord, cerebellum, and striatum, with mPPIA as endogenous gene, normalized to Group 1 mice dosed with aCSF. The hHTT expression data is shown in the following Table 18.

TABLE 18
HTT expression in mice brain tissues of Example 6.

| | Day 8 | | | | | |
|---|---|---|---|---|---|---|
| | Cortex | | | Thoracic Spinal Cord | | |
| | Rel Exp | Error | Error | Rel Exp | Error | Error |
| Group ID | HTT | Low | High | HTT | Low | High |
| 1. aCSF | 1.000 | 0.092 | 0.101 | 1.000 | 0.151 | 0.178 |
| 2. 0.1 mg AC911227 | 0.539 | 0.108 | 0.135 | 0.849 | 0.070 | 0.076 |
| 3. 0.1 mg AC911290 | 0.905 | 0.160 | 0.194 | 1.080 | 0.152 | 0.178 |
| 4. 0.1 mg AC911291 | 0.683 | 0.041 | 0.043 | 1.134 | 0.132 | 0.149 |
| 5. 0.1 mg AC911292 | 0.613 | 0.066 | 0.075 | 1.052 | 0.174 | 0.209 |
| 6. 0.1 mg AC911293 | 0.688 | 0.147 | 0.188 | 0.009 | 0.006 | 0.014 |
| 7. 0.1 mg AC911300 | 0.419 | 0.044 | 0.050 | 0.602 | 0.054 | 0.060 |
| 8. 0.1 mg AC911303 | 0.436 | 0.034 | 0.037 | 0.877 | 0.135 | 0.160 |
| 9. 0.1 mg AC911308 | 0.418 | 0.041 | 0.045 | 0.642 | 0.046 | 0.049 |
| 10. 0.1 mg AC911311 | 0.402 | 0.031 | 0.033 | 0.637 | 0.040 | 0.042 |
| 11. 0.1 mg AC911312 | 0.473 | 0.062 | 0.071 | 0.744 | 0.087 | 0.099 |
| 12. 0.1 mg AC911315 | 0.495 | 0.090 | 0.110 | 0.519 | 0.220 | 0.380 |
| 13. 0.1 mg AC911316 | 0.490 | 0.082 | 0.098 | 0.653 | 0.138 | 0.175 |
| 14. 0.1 mg AC911317 | 0.380 | 0.091 | 0.119 | 0.720 | 0.037 | 0.039 |
| 15. 0.1 mg AC911318 | 0.510 | 0.092 | 0.112 | 0.792 | 0.031 | 0.033 |
| 16. 0.1 mg AC911319 | 0.461 | 0.064 | 0.074 | 0.586 | 0.067 | 0.076 |
| 17. 0.1 mg AC911320 | 0.580 | 0.023 | 0.024 | 0.825 | 0.031 | 0.032 |
| 18. 0.1 mg AC911599 | 0.608 | 0.033 | 0.035 | 0.774 | 0.092 | 0.105 |
| 19. 0.1 mg AC911600 | 0.661 | 0.031 | 0.032 | 1.022 | 0.072 | 0.078 |
| 20. 0.1 mg AC911601 | 0.578 | 0.052 | 0.058 | 0.940 | 0.104 | 0.117 |
| 21. 0.1 mg AC911602 | 0.892 | 0.109 | 0.124 | 1.070 | 0.176 | 0.211 |
| 22. 0.1 mg AC911603 | 0.729 | 0.044 | 0.047 | 0.963 | 0.074 | 0.081 |
| | Cerebellum | | | Striatum | | |
| | Rel Exp | Error | Error | Rel Exp | Error | Error |
| Group ID | HTT | Low | High | HTT | Low | High |
| 1. aCSF | 1.000 | 0.148 | 0.174 | 1.000 | 0.178 | 0.216 |
| 2. 0.1 mg AC911227 | 0.674 | 0.064 | 0.070 | 0.662 | 0.094 | 0.109 |
| 3. 0.1 mg AC911290 | 0.887 | 0.154 | 0.187 | 0.787 | 0.143 | 0.174 |
| 4. 0.1 mg AC911291 | 0.859 | 0.103 | 0.118 | 0.727 | 0.124 | 0.150 |
| 5. 0.1 mg AC911292 | 0.861 | 0.162 | 0.200 | 0.721 | 0.055 | 0.060 |
| 6. 0.1 mg AC911293 | 0.882 | 0.174 | 0.217 | 0.548 | 0.163 | 0.232 |
| 7. 0.1 mg AC911300 | 0.499 | 0.109 | 0.139 | 0.534 | 0.069 | 0.080 |
| 8. 0.1 mg AC911303 | 0.449 | 0.092 | 0.116 | 0.443 | 0.068 | 0.080 |
| 9. 0.1 mg AC911308 | 0.964 | 0.105 | 0.117 | 0.507 | 0.062 | 0.070 |
| 10. 0.1 mg AC911311 | 0.510 | 0.103 | 0.130 | 0.560 | 0.113 | 0.142 |
| 11. 0.1 mg AC911312 | 0.736 | 0.173 | 0.225 | 0.548 | 0.144 | 0.195 |
| 12. 0.1 mg AC911315 | 0.686 | 0.109 | 0.129 | 0.576 | 0.134 | 0.175 |
| 13. 0.1 mg AC911316 | 1.090 | 0.178 | 0.213 | 0.672 | 0.042 | 0.044 |
| 14. 0.1 mg AC911317 | 0.617 | 0.171 | 0.236 | 0.545 | 0.071 | 0.081 |
| 15. 0.1 mg AC911318 | 0.643 | 0.154 | 0.203 | 0.629 | 0.092 | 0.108 |
| 16. 0.1 mg AC911319 | 0.590 | 0.104 | 0.126 | 0.611 | 0.047 | 0.051 |
| 17. 0.1 mg AC911320 | 0.929 | 0.227 | 0.301 | 0.654 | 0.118 | 0.144 |
| 18. 0.1 mg AC911599 | 0.665 | 0.098 | 0.115 | 0.794 | 0.105 | 0.121 |
| 19. 0.1 mg AC911600 | 0.783 | 0.154 | 0.192 | 0.652 | 0.075 | 0.085 |
| 20. 0.1 mg AC911601 | 0.774 | 0.176 | 0.228 | 0.811 | 0.070 | 0.076 |
| 21. 0.1 mg AC911602 | 0.894 | 0.197 | 0.253 | 0.881 | 0.082 | 0.091 |
| 22. 0.1 mg AC911603 | 0.698 | 0.116 | 0.138 | 0.791 | 0.071 | 0.078 |

[0397] In the cortex, Groups 2, 4-20, and 22 showed reduction in HTT transcripts, while Group 3 and 21 showed negligible to no reduction. In the thoracic spinal cord, Groups 6, 7, 9-16, and 18 showed reduction in HTT transcripts, while Groups 2-5, 8, 17, and 19-22 showed negligible to no reduction. In the cerebellum, Groups 2, 7, 8, 10-12, 14-16, 18-20, and 22 showed reduction in HTT transcripts, while Groups 3-6, 9, 13, 17, and 21 showed negligible to no reduction. In the striatum, Groups 2-19 and 22 showed reduction in HTT transcripts, while Groups 20 and 21 showed negligible to no reduction. Most notably, a single dose 0.1 mg AC911293 achieved ˜99% HTT transcript inhibition (0.009) in the thoracic spinal cord.

### Example 7. In Vivo Administration of HTT RNAi Agents in YAC128 Mice

[0398] HTT RNAi agents were evaluated in vivo in mice. On Day 1, four (n=4) FVB-Tg(YAC128)53Hay/J mice (2 male, 2 female) for each group were dosed, via intracerebroventricular (ICV) injection, with HTT RNAi agents formulated in artificial cerebrospinal fluid (aCSF) (at 0.1 mg total HTT RNAi agent) or with aCSF. The HTT RNAi agents were formulated at 10 mg/mL at 10 μL total injection volume. The dosing was in accordance with the following Table 19.

[0399] FVB-Tg(YAC 128)53Hay/J mice (common name: “YAC 128” mice) express the human huntingtin protein.

TABLE 19
Dosing for mice of Example 7.

| Group ID | Dose (RNAi Agent) | # of Animals |
|---|---|---|
| 1. aCSF | Day 1: Single ICV Injection | n = 4 |
| 2. 0.1 mg AC911293 | Day 1: Single ICV Injection | n = 4 |
| 3. 0.1 mg AC911300 | Day 1: Single ICV Injection | n = 4 |
| 4. 0.1 mg AC911308 | Day 1: Single ICV Injection | n = 4 |
| 5. 0.1 mg AC911317 | Day 1: Single ICV Injection | n = 4 |
| 6. 0.1 mg AC911303 | Day 1: Single ICV Injection | n = 4 |

[0400] Each of the HTT RNAi agents included modified nucleotides that were conjugated at the 5′ terminal end of the sense strand to a targeting ligand that included a lipid moiety or antigen binding moiety having the modified sequences as set forth in the duplex structures herein. (See Tables 3, 4, 5, 6, 7, 8, 9, and 10 for specific modifications and structure information related to the HTT RNAi agents, including the lipid and antigen binding moieties).

[0401] On Day 8, the mice were euthanized. From the mice, right half of the brain and thoracic spinal cord were harvested and collected for analysis.

[0402] hHTT expression was analyzed via qPCR in the cortex, thoracic spinal cord, and striatum, with mPPIA as endogenous gene, normalized to Group 1 mice dosed with aCSF. The hHTT expression data is shown in the following Table 20.

TABLE 20
HTT expression in mice brain tissues of Example 7.

| | Day 8 | | | | | | | | |
|---|---|---|---|---|---|---|---|---|---|
| | Cortex | | | Thoracic Spinal Cord | | | Striatum | | |
| | Rel Exp | Error | Error | Rel Exp | Error | Error | Rel Exp | Error | Error |
| Group ID | HTT | Low | High | HTT | Low | High | HTT | Low | High |
| 1. aCSF | 1.000 | 0.152 | 0.179 | 1.000 | 0.234 | 0.306 | 1.000 | 0.199 | 0.248 |
| 2. 0.1 mg AC911293 | 0.883 | 0.236 | 0.323 | 1.234 | 0.244 | 0.303 | 0.742 | 0.085 | 0.097 |
| 3. 0.1 mg AC911300 | 0.576 | 0.103 | 0.125 | 0.943 | 0.094 | 0.104 | 0.789 | 0.059 | 0.064 |
| 4. 0.1 mg AC911308 | 0.670 | 0.118 | 0.144 | 0.882 | 0.076 | 0.083 | 0.669 | 0.063 | 0.069 |
| 5. 0.1 mg AC911317 | 0.432 | 0.104 | 0.137 | 0.841 | 0.072 | 0.079 | 0.590 | 0.082 | 0.096 |
| 6. 0.1 mg AC911303 | 0.763 | 0.126 | 0.151 | 0.814 | 0.055 | 0.060 | 0.715 | 0.187 | 0.254 |

[0403] In the cortex, Groups 3-6 showed reduction in HTT transcripts, while Group 2 showed negligible to no reduction. In the thoracic spinal cord, Groups 2-6 showed negligible to no reduction in HTT transcripts. In the striatum, Groups 2-6 showed reduction in HTT transcripts. Most notably, a single dose 0.1 mg AC911317 achieved ˜57% HTT transcript inhibition (0.432) in the cortex.

[0404] HTT protein expression was analyzed via Jess assay in the cortex and thoracic spinal cord, with vinculin as endogenous control protein, normalized to Group 1 mice dosed with aCSF. The hHTT expression data is shown in the following Table 21.

TABLE 21
HTT protein expression in mice brain tissues of Example 7.

| | Day 8 | | | |
|---|---|---|---|---|
| | Cortex | | Thoracic Spinal Cord | |
| | Rel Exp | Std | Rel Exp | Std |
| Group ID | HTT | Dev+/− | HTT | Dev+/− |
| 1. aCSF | 1.114 | 0.239 | 1.287 | 0.620 |
| 2. 0.1 mg AC911293 | 1.322 | 0.239 | 1.426 | 0.465 |
| 3. 0.1 mg AC911300 | 0.655 | 0.215 | 1.144 | 0.797 |
| 4. 0.1 mg AC911308 | 0.723 | 0.104 | 1.270 | 0.839 |
| 5. 0.1 mg AC911317 | 0.459 | 0.193 | 0.522 | 0.306 |
| 6. 0.1 mg AC911303 | 0.536 | 0.038 | 1.311 | 0.705 |

[0405] In the cortex, Groups 3-6 showed reduction in HTT protein, while Group 2 showed negligible to no reduction. In the thoracic spinal cord, Group 5 showed reduction in HTT protein, while Groups 2-4 and 6 showed negligible to no reduction. Most notably, a single dose 0.1 mg AC911317 achieved ˜54% HTT protein inhibition (0.459) in the cortex.

### Example 8. In Vivo Administration of HTT RNAi Agents in YAC128 Mice

[0406] HTT RNAi agents were evaluated in vivo in mice. On Day 1, four (n=4) FVB-Tg(YAC128)53Hay/J mice (2 male, 2 female) for each group were dosed, via intracerebroventricular (ICV) injection, with HTT RNAi agents formulated in artificial cerebrospinal fluid (aCSF) (at 0.1 mg total HTT RNAi agent) or with aCSF. The HTT RNAi agents were formulated at 10 mg/mL at 10 μL total injection volume. The dosing was in accordance with the following Table 22.

[0407] FVB-Tg(YAC 128)53Hay/J mice (common name: “YAC 128” mice) express the human huntingtin protein.

TABLE 22
Dosing for mice of Example 8.

| Group ID | Dose (RNAi Agent) | # of Animals |
|---|---|---|
| 1. aCSF | Day 1: Single ICV Injection | n = 4 |
| 2. 0.1 mg AC911311 | Day 1: Single ICV Injection | n = 4 |
| 3. 0.1 mg AC911312 | Day 1: Single ICV Injection | n = 4 |
| 4. 0.1 mg AC911313 | Day 1: Single ICV Injection | n = 4 |
| 5. 0.1 mg AC911310 | Day 1: Single ICV Injection | n = 4 |
| 6. 0.1 mg AC911315 | Day 1: Single ICV Injection | n = 4 |
| 7. 0.1 mg AC911321 | Day 1: Single ICV Injection | n = 4 |
| 8. 0.1 mg AC911316 | Day 1: Single ICV Injection | n = 4 |
| 9. 0.1 mg AC911319 | Day 1: Single ICV Injection | n = 4 |
| 10. 0.1 mg AC911300 | Day 1: Single ICV Injection | n = 4 |
| 11. 0.1 mg AC911317 | Day 1: Single ICV Injection | n = 4 |

[0408] Each of the HTT RNAi agents included modified nucleotides that were conjugated at the 5′ terminal end of the sense strand to a targeting ligand that included a lipid moiety or antigen binding moiety having the modified sequences as set forth in the duplex structures herein. (See Tables 3, 4, 5, 6, 7, 8, 9, and 10 for specific modifications and structure information related to the HTT RNAi agents, including the lipid and antigen binding moieties).

[0409] On Day 8, the mice were euthanized. From the mice, right half of the brain and thoracic spinal cord were harvested and collected for analysis.

[0410] hHTT expression was analyzed via qPCR in the cortex, thoracic spinal cord, and cerebellum, with mPPIA as endogenous gene, normalized to Group 1 mice dosed with aCSF. The hHTT expression data is shown in the following Table 23.

TABLE 23
HTT expression in mice brain tissues of Example 8.

| | Day 8 | | | | | | | | |
|---|---|---|---|---|---|---|---|---|---|
| | Cortex | | | Thoracic Spinal Cord | | | Cerebellum | | |
| | Rel Exp | Error | Error | Rel Exp | Error | Error | Rel Exp | Error | Error |
| Group ID | HTT | Low | High | HTT | Low | High | HTT | Low | High |
| 1. aCSF | 1.000 | 0.136 | 0.158 | 1.000 | 0.087 | 0.096 | 1.000 | 0.154 | 0.182 |
| 2. 0.1 mg AC911311 | 0.594 | 0.072 | 0.081 | 0.857 | 0.041 | 0.043 | 0.980 | 0.109 | 0.123 |
| 3. 0.1 mg AC911312 | 0.685 | 0.075 | 0.084 | 1.005 | 0.055 | 0.058 | 0.920 | 0.099 | 0.110 |
| 4. 0.1 mg AC911313 | 0.714 | 0.080 | 0.090 | 0.914 | 0.085 | 0.093 | 1.058 | 0.092 | 0.101 |
| 5. 0.1 mg AC911310 | 0.557 | 0.063 | 0.071 | 0.751 | 0.041 | 0.043 | 0.936 | 0.081 | 0.089 |
| 6. 0.1 mg AC911315 | 0.593 | 0.025 | 0.026 | 0.853 | 0.063 | 0.068 | 0.946 | 0.061 | 0.065 |
| 7. 0.1 mg AC911321 | 0.410 | 0.027 | 0.029 | 0.678 | 0.068 | 0.075 | 0.961 | 0.070 | 0.076 |
| 8. 0.1 mg AC911316 | 0.437 | 0.042 | 0.047 | 0.719 | 0.037 | 0.039 | 0.988 | 0.073 | 0.079 |
| 9. 0.1 mg AC911319 | 0.317 | 0.039 | 0.044 | 0.595 | 0.082 | 0.095 | 0.896 | 0.098 | 0.110 |
| 10. 0.1 mg AC911300 | 0.413 | 0.039 | 0.043 | 0.710 | 0.036 | 0.038 | 1.035 | 0.089 | 0.097 |
| 11. 0.1 mg AC911317 | 0.358 | 0.052 | 0.061 | 0.711 | 0.069 | 0.076 | 0.749 | 0.245 | 0.364 |

[0411] In the cortex, Groups 2-11 showed reduction in HTT transcripts. In the thoracic spinal cord, Groups 5 and 7-11 showed reduction in HTT transcripts, while Groups 2-4 and 6 showed negligible to no reduction. In the cerebellum, Group 11 showed reduction in HTT transcripts, while Groups 2-10 showed negligible to no reduction. Most notably, a single dose 0.1 mg AC911319 achieved ˜68% HTT transcript inhibition (0.317) in the cortex.

[0412] HTT protein expression was analyzed via bicinchoninic acid (BCA) assay in the cortex, normalized to Group 1 mice dosed with aCSF. The hHTT expression data is shown in the following Table 24.

TABLE 24
HTT protein expression in mice brain tissues of Example 8.

Day 8
Cortex

| Group ID | Rel Exp HTT | Std Dev+/− |
|---|---|---|
| 1. aCSF | 1.000 | 0.115 |
| 2. 0.1 mg AC911311 | 0.475 | 0.101 |
| 3. 0.1 mg AC911312 | 0.756 | 0.053 |
| 4. 0.1 mg AC911313 | 0.696 | 0.056 |
| 5. 0.1 mg AC911310 | 0.653 | 0.109 |
| 6. 0.1 mg AC911315 | 0.633 | 0.086 |
| 7. 0.1 mg AC911321 | 0.683 | 0.073 |
| 8. 0.1 mg AC911316 | 0.649 | 0.074 |
| 9. 0.1 mg AC911319 | 0.517 | 0.039 |
| 10. 0.1 mg AC911300 | 0.598 | 0.067 |
| 11. 0.1 mg AC911317 | 0.545 | 0.124 |

[0413] In the cortex, Groups 2-11 showed reduction in HTT protein. Most notably, a single dose 0.1 mg AC911311 achieved ˜52% HTT protein inhibition (0.475) in the cortex.

### Example 9. In Vivo Administration of HTT RNAi Agents in YAC128 Mice

[0414] HTT RNAi agents were evaluated in vivo in mice. On Days 1, 4, 7, and 10, four (n=4) FVB-Tg(YAC128)53Hay/J mice (2 male, 2 female) for each group were dosed, via intravenous (IV) injection, with HTT RNAi agents formulated in saline (at 1.5 mg/kg) or with PBS. The HTT RNAi agents were formulated at 200 μL/20 g animal body weight. The dosing was in accordance with the following Table 25.

[0415] FVB-Tg(YAC 128)53Hay/J mice (common name: “YAC 128” mice) express the human huntingtin protein.

TABLE 25
Dosing for mice of Example 9.

| Group ID | Dose (RNAi Agent) | # of Animals |
|---|---|---|
| 1. PBS | Days 1, 4, 7, 10: 4x Single | n = 4 |
| | IV Injections | |
| 2. 1.5 mg/kg AC004497 | Days 1, 4, 7, 10: 4x Single | n = 4 |
| | IV Injections | |
| 3. 1.5 mg/kg AC004498 | Days 1, 4, 7, 10: 4x Single | n = 4 |
| | IV Injections | |
| 4. 1.5 mg/kg AC004499 | Days 1, 4, 7, 10: 4x Single | n = 4 |
| | IV Injections | |

[0416] Each of the HTT RNAi agents included modified nucleotides that were conjugated at the 5′ terminal end of the sense strand to a targeting ligand that included a lipid moiety or antigen binding moiety having the modified sequences as set forth in the duplex structures herein. (See Tables 3, 4, 5, 6, 7, 8, 9, and 10 for specific modifications and structure information related to the HTT RNAi agents, including the lipid and antigen binding moieties).

[0417] On Day 22, the mice were euthanized. From the mice, right half of the brain and thoracic spinal cord were harvested and collected for analysis.

[0418] hHTT expression was analyzed via qPCR in the cortex, thoracic spinal cord, cerebellum, and striatum, with mPPIA as endogenous gene, normalized to Group 1 mice dosed with PBS. The hHTT expression data is shown in the following Table 26.

TABLE 26
HTT expression in mice brain tissues of Example 9.

| | Day 22 | | | | | |
|---|---|---|---|---|---|---|
| | Cortex | | | Thoracic Spinal Cord | | |
| | Rel Exp | Error | Error | Rel Exp | Error | Error |
| Group ID | HTT | Low | High | HTT | Low | High |
| 1. PBS | 1.000 | 0.165 | 0.198 | 1.000 | 0.098 | 0.109 |
| 2. 1.5 mg/kg AC004497 | 0.748 | 0.249 | 0.374 | 0.639 | 0.213 | 0.319 |
| 3. 1.5 mg/kg AC004498 | 0.905 | 0.110 | 0.125 | 0.810 | 0.109 | 0.126 |
| 4. 1.5 mg/kg AC004499 | 0.653 | 0.118 | 0.144 | 0.708 | 0.078 | 0.088 |
| | Cerebellum | | | Striatum | | |
| | Rel Exp | Error | Error | Rel Exp | Error | Error |
| Group ID | HTT | Low | High | HTT | Low | High |
| 1. PBS | 1.000 | 0.093 | 0.102 | 1.000 | 0.129 | 0.148 |
| 2. 1.5 mg/kg AC004497 | 0.785 | 0.246 | 0.359 | 0.786 | 0.233 | 0.330 |
| 3. 1.5 mg/kg AC004498 | 0.661 | 0.094 | 0.110 | 1.062 | 0.122 | 0.138 |
| 4. 1.5 mg/kg AC004499 | 0.817 | 0.139 | 0.167 | 0.898 | 0.070 | 0.076 |

[0419] In the cortex, Groups 2 and 4 showed reduction in HTT transcripts, while Group 3 showed negligible to no reduction. In the thoracic spinal cord, Groups 2 and 4 showed reduction in HTT transcripts, while Group 3 showed negligible to no reduction. In the cerebellum, Groups 2 and 3 showed reduction in HTT transcripts, while Group 4 showed negligible to no reduction. In the striatum, Group 2 showed reduction in HTT transcripts, while Groups 3 and 4 showed negligible to no reduction. Most notably, 4× doses 1.5 mg/kg AC004497 achieved ˜36% HTT transcript inhibition (0.639) in the thoracic spinal cord.

### Example 10. In Vivo Administration of HTT RNAi Agents in YAC128 Mice

[0420] HTT RNAi agents were evaluated in vivo in mice. On Day 1, four (n=4) FVB-Tg(YAC128)53Hay/J mice (2 male, 2 female) for each group were dosed, via intracerebroventricular (ICV) injection, with HTT RNAi agents formulated in artificial cerebrospinal fluid (aCSF) (at 0.3 mg total HTT RNAi agent) or with aCSF. The HTT RNAi agents were formulated at 30 mg/mL at 10 μL total injection volume. The dosing was in accordance with the following Table 27.

[0421] FVB-Tg(YAC 128)53Hay/J mice (common name: “YAC 128” mice) express the human huntingtin protein.

TABLE 27
Dosing for mice of Example 10.

| Group ID | Dose (RNAi Agent) | # of Animals |
|---|---|---|
| 1. aCSF | Day 1: Single ICV Injection | n = 4 |
| 2. 0.3 mg AC911290 | Day 1: Single ICV Injection | n = 4 |
| 3. 0.3 mg AC911291 | Day 1: Single ICV Injection | n = 4 |
| 4. 0.3 mg AC911292 | Day 1: Single ICV Injection | n = 4 |
| 5. 0.3 mg AC911293 | Day 1: Single ICV Injection | n = 4 |
| 6. 0.3 mg AC911294 | Day 1: Single ICV Injection | n = 4 |
| 7. 0.3 mg AC911295 | Day 1: Single ICV Injection | n = 4 |
| 8. 0.3 mg AC911599 | Day 1: Single ICV Injection | n = 4 |
| 9. 0.3 mg AC911600 | Day 1: Single ICV Injection | n = 4 |
| 10. 0.3 mg AC911601 | Day 1: Single ICV Injection | n = 4 |
| 11. 0.3 mg AC911602 | Day 1: Single ICV Injection | n = 4 |
| 12. 0.3 mg AC911603 | Day 1: Single ICV Injection | n = 4 |
| 13. 0.3 mg AC911321 | Day 1: Single ICV Injection | n = 4 |
| 14. 0.3 mg AC911319 | Day 1: Single ICV Injection | n = 4 |
| 15. 0.3 mg AC911317 | Day 1: Single ICV Injection | n = 4 |
| 16. 0.3 mg AC911300 | Day 1: Single ICV Injection | n = 4 |
| 17. 0.3 mg AC004592* | Day 1: Single ICV Injection | n = 4 |
| 18. 0.3 mg AC004593** | Day 1: Single ICV Injection | n = 4 |
| 19. 0.3 mg CA005562*** | Day 1: Single ICV Injection | n = 4 |

*AC004592 is an RNAi agent having the sequences:
Antisense: vpusAfsucdAgCfuuuudCcAfgdGgucgcscsg (Seq ID No. 458)
Sense: gscsgaccC16CfuGfGfAfaaagcugasusa (Seq ID No. 576)
**AC004593 is an RNAi agent having the sequences:
Antisense: vpusAfsucdAgC_{UNA}uuuudCcAfgdGgucgcscsg (Seq ID No. 459)
Sense: gscsgaccC16CfuGfGfAfaaagcugasusa (Seq ID No. 576)
Wherein cC16 is 2′-O-hexadecyl cytidine, vp is 5′-vinyl phosphonate, dN is a deoxy nucleotide, lower case nucleotides are of 2′-O-methyl modified nucleotides, Nf are of 2′-fluoro modified nucleotides, s is a phosphorothioate linkage, C_{UNA} 2′,3′-seco-cytidine; see PCT Publication WO 2022/212231
***CA005562 is an antisense oligonucleotide having the sequence
mCMs, TM, mCM, AM, GMs, dTs, dAs, dAs, mdCs, dAs, dTs, dTs, dGs, dAs, mdCs, AM, mCM, mCM, AMs, mCM, wherein mC is a 5-methyl cytosine nucleobase, M is a 2′-MOE sugar moiety, dN is a deoxy nucleotide, and s is a phosphorothioate nucleoside linkage; see PCT Publication WO2021/168183

[0422] Each of the HTT RNAi agents included modified nucleotides that were conjugated at the 5′ terminal end of the sense strand to a targeting ligand that included a lipid moiety or antigen binding moiety having the modified sequences as set forth in the duplex structures herein. (See Tables 3, 4, 5, 6, 7, 8, 9, and 10 for specific modifications and structure information related to the HTT RNAi agents, including the lipid and antigen binding moieties).

[0423] On Day 29, the mice were euthanized. From the mice, right half of the brain and thoracic spinal cord were harvested and collected for analysis.

[0424] HTT protein expression was analyzed via Jess protein assay in the cortex, normalized to Group 1 mice dosed with aCSF. HTT protein was quantified using Anti-Polyglutamine-Expansion Diseases Marker Antibody (Sigma-Aldrich®, Cat. MAB 1574) and Anti-Huntingtin Protein Antibody (Sigma-Aldrich®, Cat. MAB2166). The HTT expression data is shown in the following Table 28.

TABLE 28
HTT protein expression in mice brain tissues of Example 10.

| | Day 29 | | | |
|---|---|---|---|---|
| | Cortex | | | |
| | MAB1574 | | MAB2166 | |
| | Rel Exp | Std | Rel Exp | Std |
| Group ID | HTT | Dev+/− | HTT | Dev+/− |
| 1. aCSF | 1.000 | 0.039 | 1.158 | 0.150 |
| 2. 0.3 mg AC911290 | 0.603 | 0.096 | 0.843 | 0.157 |
| 3. 0.3 mg AC911291 | 0.952 | 0.070 | 0.444 | 0.076 |
| 4. 0.3 mg AC911292 | 0.883 | 0.123 | 0.455 | 0.102 |
| 5. 0.3 mg AC911293 | 0.444 | 0.069 | 0.279 | 0.093 |
| 6. 0.3 mg AC911294 | 0.858 | 0.123 | 0.852 | 0.053 |
| 7. 0.3 mg AC911295 | 0.757 | 0.072 | 0.497 | 0.127 |
| 8. 0.3 mg AC911599 | 0.663 | 0.118 | 0.487 | 0.084 |
| 9. 0.3 mg AC911600 | 0.601 | 0.129 | 0.135 | 0.025 |
| 10. 0.3 mg AC911601 | 0.822 | 0.072 | 0.698 | 0.204 |
| 11. 0.3 mg AC911602 | 0.898 | 0.076 | 1.314 | 0.075 |
| 12. 0.3 mg AC911603 | 0.589 | 0.082 | 0.741 | 0.120 |
| 13. 0.3 mg AC911321 | 0.273 | 0.032 | 0.191 | 0.039 |
| 14. 0.3 mg AC911319 | 0.155 | 0.051 | 0.479 | 0.191 |
| 15. 0.3 mg AC911317 | 0.241 | 0.083 | 0.315 | 0.087 |
| 16. 0.3 mg AC911300 | 0.137 | 0.023 | 1.091 | 0.133 |
| 17. 0.3 mg AC004592 | 0.573 | 0.079 | 0.233 | 0.034 |
| 18. 0.3 mg AC004593 | 0.635 | 0.039 | 0.934 | 0.076 |
| 19. 0.3 mg CA005562 | 0.333 | 0.057 | 1.158 | 0.150 |

[0425] When quantified using MAB1574, Groups 2, 5, 7-9, 12, 13-19 showed inhibition of HTT protein. Most notably, a single 0.3 mg AC911300 dose achieved ˜86% HTT protein inhibition (0.137) in the cortex. When quantified using MAB2166, Groups 3-5, 7-10, 12-15, and 17 showed inhibition of HTT protein. Most notably, a single 0.3 mg AC911600 dose achieved ˜86% HTT protein inhibition (0.135) in the cortex.

### Example 11. In Vivo Administration of HTT RNAi Agents in YAC128 Mice

[0426] HTT RNAi agents were evaluated in vivo in mice. On Day 1, four (n=4) FVB-Tg(YAC128)53Hay/J mice (2 male, 2 female) for each group were dosed, via intracerebroventricular (ICV) injection, with HTT RNAi agents formulated in artificial cerebrospinal fluid (aCSF) (at 0.1 mg total HTT RNAi agent) or with aCSF. The HTT RNAi agents were formulated at 10 mg/mL at 10 μL total injection volume. The dosing was in accordance with the following Table 29.

[0427] FVB-Tg(YAC 128)53Hay/J mice (common name: “YAC 128” mice) express the human huntingtin protein.

TABLE 29
Dosing for mice of Example 11.

| Group ID | Dose (RNAi Agent) | # of Animals |
|---|---|---|
| 1. aCSF | Day 1: Single ICV Injection | n = 4 |
| 2. 0.1 mg AC911321 | Day 1: Single ICV Injection | n = 4 |
| 3. 0.1 mg AC005500 | Day 1: Single ICV Injection | n = 4 |
| 4. 0.1 mg AC004575 | Day 1: Single ICV Injection | n = 4 |
| 5. 0.1 mg AC005501 | Day 1: Single ICV Injection | n = 4 |
| 6. 0.1 mg AC005533 | Day 1: Single ICV Injection | n = 4 |
| 7. 0.1 mg AC005503 | Day 1: Single ICV Injection | n = 4 |
| 8. 0.1 mg AC005504 | Day 1: Single ICV Injection | n = 4 |
| 9. 0.1 mg AC005510 | Day 1: Single ICV Injection | n = 4 |
| 10. 0.1 mg AC005505 | Day 1: Single ICV Injection | n = 4 |
| 11. 0.1 mg AC005506 | Day 1: Single ICV Injection | n = 4 |
| 12. 0.1 mg AC005507 | Day 1: Single ICV Injection | n = 4 |
| 13. 0.1 mg AC005508 | Day 1: Single ICV Injection | n = 4 |
| 14. 0.1 mg AC005509 | Day 1: Single ICV Injection | n = 4 |

[0428] Each of the HTT RNAi agents included modified nucleotides that were conjugated at the 5′ terminal end of the sense strand to a targeting ligand that included a lipid moiety or antigen binding moiety having the modified sequences as set forth in the duplex structures herein. (See Tables 3, 4, 5, 6, 7, 8, 9, and 10 for specific modifications and structure information related to the HTT RNAi agents, including the lipid and antigen binding moieties).

[0429] On Day 29, the mice were euthanized. From the mice, right half of the brain and thoracic spinal cord were harvested and collected for analysis.

[0430] HTT protein expression was analyzed via Jess protein assay in the cortex, normalized to Group 1 mice dosed with aCSF. HTT protein was quantified using Anti-Huntingtin Protein Antibody (Sigma-Aldrich®, Cat. MAB2166). The HTT expression data is shown in the following Table 30.

TABLE 30
HTT protein expression in mice brain tissues of Example 11.

Day 29
Cortex

| Group ID | Rel Exp HTT | Std Dev+/− |
|---|---|---|
| 1. aCSF | 0.998 | 0.044 |
| 2. 0.1 mg AC911321 | 0.470 | 0.116 |
| 3. 0.1 mg AC005500 | 0.223 | 0.033 |
| 4. 0.1 mg AC004575 | 0.645 | 0.032 |
| 5. 0.1 mg AC005501 | 0.669 | 0.124 |
| 6. 0.1 mg AC005533 | 0.539 | 0.198 |
| 7. 0.1 mg AC005503 | 0.795 | 0.023 |
| 8. 0.1 mg AC005504 | 0.526 | 0.084 |
| 9. 0.1 mg AC005510 | 0.462 | 0.010 |
| 10. 0.1 mg AC005505 | 0.724 | 0.100 |
| 11. 0.1 mg AC005506 | 0.519 | 0.098 |
| 12. 0.1 mg AC005507 | 0.482 | 0.063 |
| 13. 0.1 mg AC005508 | 0.786 | 0.085 |
| 14. 0.1 mg AC005509 | 0.792 | 0.104 |

[0431] In the cortex, Groups 2-14 showed reduction in HTT protein. Most notably, a single dose 0.1 mg AC005500 achieved ˜78% HTT protein inhibition (0.223) in the cortex.

### Example 12. In Vivo Administration of HTT RNAi Agents in YAC128 Mice

[0432] HTT RNAi agents were evaluated in vivo in mice. On Day 1, four (n=4) FVB-Tg(YAC128)53Hay/J mice (2 male, 2 female) for each group were dosed, via intracerebroventricular (ICV) injection, with HTT RNAi agents formulated in artificial cerebrospinal fluid (aCSF) (at 0.1 mg total HTT RNAi agent) or with aCSF. The HTT RNAi agents were formulated at 10 mg/mL at 10 μL total injection volume. The dosing was in accordance with the following Table 31.

[0433] FVB-Tg(YAC 128)53Hay/J mice (common name: “YAC 128” mice) express the human huntingtin protein.

TABLE 31
Dosing for mice of Example 12.

| Group ID | Dose (RNAi Agent) | # of Animals |
|---|---|---|
| 1. aCSF | Day 1: Single ICV Injection | n = 4 |
| 2. 0.1 mg AC911319 | Day 1: Single ICV Injection | n = 4 |
| 3. 0.1 mg AC005522 | Day 1: Single ICV Injection | n = 4 |
| 4. 0.1 mg AC004576 | Day 1: Single ICV Injection | n = 4 |
| 5. 0.1 mg AC005523 | Day 1: Single ICV Injection | n = 4 |
| 6. 0.1 mg AC005524 | Day 1: Single ICV Injection | n = 4 |
| 7. 0.1 mg AC005525 | Day 1: Single ICV Injection | n = 4 |
| 8. 0.1 mg AC005526 | Day 1: Single ICV Injection | n = 4 |
| 9. 0.1 mg AC005527 | Day 1: Single ICV Injection | n = 4 |
| 10. 0.1 mg AC005528 | Day 1: Single ICV Injection | n = 4 |
| 11. 0.1 mg AC005529 | Day 1: Single ICV Injection | n = 4 |
| 12. 0.1 mg AC005530 | Day 1: Single ICV Injection | n = 4 |
| 13. 0.1 mg AC005531 | Day 1: Single ICV Injection | n = 4 |
| 14. 0.1 mg AC005532 | Day 1: Single ICV Injection | n = 4 |

[0434] Each of the HTT RNAi agents included modified nucleotides that were conjugated at the 5′ terminal end of the sense strand to a targeting ligand that included a lipid moiety or antigen binding moiety having the modified sequences as set forth in the duplex structures herein. (See Tables 3, 4, 5, 6, 7, 8, 9, and 10 for specific modifications and structure information related to the HTT RNAi agents, including the lipid and antigen binding moieties).

[0435] On Day 29, the mice were euthanized. From the mice, right half of the brain and thoracic spinal cord were harvested and collected for analysis.

[0436] HTT protein expression was analyzed via Jess protein assay in the cortex, normalized to Group 1 mice dosed with aCSF. HTT protein was quantified using Anti-Polyglutamine-Expansion Diseases Marker Antibody (Sigma-Aldrich®, Cat. MAB1574). The HTT expression data is shown in the following Table 32.

TABLE 32
HTT protein expression in mice brain tissues of Example 12.

| | Day 29 | | | |
|---|---|---|---|---|
| | Cortex | | Striatum | |
| | Rel Exp | | Rel Exp | |
| Group ID | HTT | Std Dev+/− | HTT | Std Dev+/− |
| 1. aCSF | 1.000 | 0.046 | 0.996 | 0.089 |
| 2. 0.1 mg AC911319 | 0.300 | 0.104 | 0.440 | 0.181 |
| 3. 0.1 mg AC005522 | 0.337 | 0.117 | 0.368 | 0.036 |
| 4. 0.1 mg AC004576 | 0.390 | 0.033 | 0.419 | 0.066 |
| 5. 0.1 mg AC005523 | 0.328 | 0.114 | 0.346 | 0.107 |
| 6. 0.1 mg AC005524 | 0.236 | 0.034 | 0.401 | 0.042 |
| 7. 0.1 mg AC005525 | 0.239 | N/A* | 0.256 | N/A* |
| 8. 0.1 mg AC005526 | 0.464 | 0.166 | 0.612 | 0.090 |
| 9. 0.1 mg AC005527 | 0.486 | 0.089 | 0.516 | 0.072 |
| 10. 0.1 mg AC005528 | 0.727 | 0.118 | 0.732 | 0.060 |
| 11. 0.1 mg AC005529 | 0.284 | 0.162 | 0.383 | 0.181 |
| 12. 0.1 mg AC005530 | 0.433 | 0.129 | 0.510 | 0.042 |
| 13. 0.1 mg AC005531 | 0.276 | 0.178 | 0.387 | 0.152 |
| 14. 0.1 mg AC005532 | 0.261 | 0.106 | 0.300 | 0.102 |

*Standard deviation not available due to only 1 sample data.

[0437] In the cortex and striatum, Groups 2-14 showed reduction in HTT protein. Most notably, in the cortex, a single dose 0.1 mg AC005524 achieved ˜76% HTT protein inhibition (0.236). Also notably, in the striatum, a single dose 0.1 mg AC005525 achieved ˜74% HTT protein inhibition (0.256).

### Example 13. In Vivo Administration of HTT RNAi Agents in YAC128 Mice

[0438] HTT RNAi agents were evaluated in vivo in mice. On Day 1, five (n=5) FVB-Tg(YAC128)53Hay/J mice (of mixed gender M/F) for each group were dosed, via subcutaneous (SC) injection, with HTT RNAi agents formulated in phosphate buffered saline (PBS) (at 3.0 mg/kg, adjusted for individual animal body weight) or with PBS. The HTT RNAi agents were formulated at 250 μl/25 g dose volume. The dosing was in accordance with the following Table 33.

[0439] FVB-Tg(YAC 128)53Hay/J mice (common name: “YAC 128” mice) express the human huntingtin protein.

TABLE 33
Dosing for mice of Example 13.

| Group ID | Dose (RNAi Agent) | # of Animals |
|---|---|---|
| 1. PBS | Day 1, 2, 3, 4: SC Injection | n = 5 |
| 2. 3.0 mg/kg AC004499 | Day 1, 2, 3, 4: SC Injection | n = 5 |
| 3. 3.0 mg/kg AC006000 | Day 1, 2, 3, 4: SC Injection | n = 5 |
| 4. 3.0 mg/kg AC006001 | Day 1, 2, 3, 4: SC Injection | n = 5 |

[0440] Each of the HTT RNAi agents included modified nucleotides that were conjugated at the 5′ terminal end of the sense strand to a targeting ligand that included a lipid moiety or antigen binding moiety having the modified sequences as set forth in the duplex structures herein. (See Tables 3, 4, 5, 6, 7, 8, 9, and 10 for specific modifications and structure information related to the HTT RNAi agents, including the lipid and antigen binding moieties).

[0441] On Day 29, the mice were euthanized. From the mice, right half of the brain and thoracic spinal cord were harvested and collected for analysis.

[0442] HTT protein expression was analyzed via Jess protein assay in the cortex, normalized to Group 1 mice dosed with PBS. HTT protein was quantified using Anti-Polyglutamine-Expansion Diseases Marker Antibody (Sigma-Aldrich®, Cat. MAB1574). The HTT expression data is shown in the following Table 34.

TABLE 34
HTT protein expression in mice brain tissues of Example 13.

| | MAB1574 | | | |
|---|---|---|---|---|
| | Cortex | | Striatum | |
| | Rel Exp | | Rel Exp | |
| Group ID | HTT | Std Dev+/− | HTT | Std Dev+/− |
| 1. PBS | 1.000 | 0.041 | 1.272 | 0.573 |
| 2. 3.0 mg/kg AC004499 | 0.575 | 0.019 | 0.483 | 0.099 |
| 3. 3.0 mg/kg AC006000 | 0.589 | 0.039 | 0.631 | 0.076 |
| 4. 3.0 mg/kg AC006001 | 0.791 | 0.044 | 0.732 | 0.065 |
| | Thoracic Spinal Cord | | Cerebellum | |
| | Rel Exp | | Rel Exp | |
| Group ID | HTT | Std Dev+/− | HTT | Std Dev+/− |
| 1. PBS | 1.000 | 0.059 | 1.000 | 0.060 |
| 2. 3.0 mg/kg AC004499 | 0.592 | 0.032 | 0.739 | 0.047 |
| 3. 3.0 mg/kg AC006000 | 0.704 | 0.108 | 0.744 | 0.022 |
| 4. 3.0 mg/kg AC006001 | 0.890 | 0.056 | 0.915 | 0.042 |

[0443] When quantified using MAB 1574, Groups 2-4 showed inhibition of HTT protein in the cortex. Most notably, 4× doses of 3/0 mg/kg AC004499 achieved ˜42% protein inhibition (0.575).

### Example 14. In Vivo Administration of HTT RNAi Agents in YAC128 Mice

[0444] HTT RNAi agents were evaluated in vivo in mice. On Day 1, four (n=4) FVB-Tg(YAC128)53Hay/J mice (2 male, 2 female) for each group were dosed, via intracerebroventricular (ICV) injection, with HTT RNAi agents formulated in artificial cerebrospinal fluid (aCSF) (at 0.1 mg total HTT RNAi agent) or with aCSF. The HTT RNAi agents were formulated at 10 mg/mL at 10 μL total injection volume. The dosing was in accordance with the following Table 35.

[0445] FVB-Tg(YAC 128)53Hay/J mice (common name: “YAC 128” mice) express the human huntingtin protein.

TABLE 35
Dosing for mice of Example 14.

| Group ID | Dose (RNAi Agent) | # of Animals |
|---|---|---|
| 1. aCSF | Day 1: Single ICV Injection | n = 4 |
| 2. 0.1 mg AC911317 | Day 1: Single ICV Injection | n = 4 |
| 3. 0.1 mg AC005511 | Day 1: Single ICV Injection | n = 4 |
| 4. 0.1 mg AC004577 | Day 1: Single ICV Injection | n = 4 |
| 5. 0.1 mg AC005512 | Day 1: Single ICV Injection | n = 4 |
| 6. 0.1 mg AC005513 | Day 1: Single ICV Injection | n = 4 |
| 7. 0.1 mg AC005514 | Day 1: Single ICV Injection | n = 4 |
| 8. 0.1 mg AC005515 | Day 1: Single ICV Injection | n = 4 |
| 9. 0.1 mg AC005516 | Day 1: Single ICV Injection | n = 4 |
| 10. 0.1 mg AC005517 | Day 1: Single ICV Injection | n = 4 |
| 11. 0.1 mg AC005518 | Day 1: Single ICV Injection | n = 4 |
| 12. 0.1 mg AC005519 | Day 1: Single ICV Injection | n = 4 |
| 13. 0.1 mg AC005520 | Day 1: Single ICV Injection | n = 4 |
| 14. 0.1 mg AC005521 | Day 1: Single ICV Injection | n = 4 |

[0446] Each of the HTT RNAi agents included modified nucleotides that were conjugated at the 5′ terminal end of the sense strand to a targeting ligand that included a lipid moiety or antigen binding moiety having the modified sequences as set forth in the duplex structures herein. (See Tables 3, 4, 5, 6, 7, 8, 9, and 10 for specific modifications and structure information related to the HTT RNAi agents, including the lipid and antigen binding moieties).

[0447] On Day 29, the mice were euthanized. From the mice, right half of the brain and thoracic spinal cord were harvested and collected for analysis.

[0448] HTT protein expression was analyzed via Jess protein assay in the cortex, normalized to Group 1 mice dosed with aCSF. HTT protein was quantified using Anti-Polyglutamine-Expansion Diseases Marker Antibody (Sigma-Aldrich®, Cat. MAB1574). The HTT expression data is shown in the following Table 36.

TABLE 36
HTT protein expression in mice brain tissues of Example 14.

| | Day 29 | | | |
|---|---|---|---|---|
| | Cortex | | Striatum | |
| | Rel Exp | | Rel Exp | |
| Group ID | HTT | Std Dev+/− | HTT | Std Dev+/− |
| 1. aCSF | 1.000 | 0.033 | 1.000 | 0.063 |
| 2. 0.1 mg AC911317 | 0.479 | 0.087 | 0.664 | 0.137 |
| 3. 0.1 mg AC005511 | 0.305 | 0.082 | 0.371 | 0.059 |
| 4. 0.1 mg AC004577 | 0.384 | 0.056 | 0.547 | 0.085 |
| 5. 0.1 mg AC005512 | 0.385 | 0.107 | 0.545 | 0.131 |
| 6. 0.1 mg AC005513 | 0.439 | 0.115 | 0.550 | 0.063 |
| 7. 0.1 mg AC005514 | 0.333 | 0.033 | 0.517 | 0.058 |
| 8. 0.1 mg AC005515 | 0.608 | 0.075 | 0.648 | 0.079 |
| 9. 0.1 mg AC005516 | 0.924 | 0.068 | 0.830 | 0.113 |
| 10. 0.1 mg AC005517 | 0.396 | 0.132 | 0.484 | 0.135 |
| 11. 0.1 mg AC005518 | 0.857 | 0.083 | 0.922 | 0.054 |
| 12. 0.1 mg AC005519 | 0.438 | 0.148 | 0.377 | 0.024 |
| 13. 0.1 mg AC005520 | 0.462 | 0.109 | 0.480 | 0.057 |
| 14. 0.1 mg AC005521 | 0.373 | 0.063 | 0.476 | 0.094 |

[0449] In the cortex and striatum, Groups 2-8, 10, and 12-14 showed reduction in HTT protein; Groups 9 and 11 showed little to negligible reduction. Most notably, in the cortex, a single dose 0.1 mg AC005511 achieved ˜69% HTT protein inhibition (0.305). Also notably, in the striatum, a single dose 0.1 mg AC005511 achieved ˜63% HTT protein inhibition (0.371).

### Example 15. In Vivo Administration of HTT RNAi Agents in YAC128 Mice

[0450] HTT RNAi agents were evaluated in vivo in mice. On Day 1, four (n=4) FVB-Tg(YAC128)53Hay/J mice (2 male, 2 female) for each group were dosed, via intracerebroventricular (ICV) injection, with HTT RNAi agents formulated in artificial cerebrospinal fluid (aCSF) (at 30 μg, 100 μg, or 300 μg total HTT RNAi agent) or with aCSF (control). The HTT RNAi agents were formulated at 3 mg/mL, 10 mg/mL, or 30 mg/mL, at 10 μL total injection volume. The dosing was in accordance with the following Table 37.

[0451] FVB-Tg(YAC 128)53Hay/J mice (common name: “YAC 128” mice) express the human huntingtin protein.

TABLE 37
Dosing for mice of Example 15.

| Group ID | Dose (RNAi Agent) | # of Animals |
|---|---|---|
| 1. aCSF | Day 1: Single ICV Injection | n = 4 |
| 2. 30 μg AC006707 | Day 1: Single ICV Injection | n = 4 |
| 3. 100 μg AC006707 | Day 1: Single ICV Injection | n = 4 |
| 4. 300 μg AC006707 | Day 1: Single ICV Injection | n = 4 |
| 5. 30 μg AC004593 | Day 1: Single ICV Injection | n = 4 |
| 6. 100 μg AC004593 | Day 1: Single ICV Injection | n = 4 |
| 7. 300 μg AC004593 | Day 1: Single ICV Injection | n = 4 |
| 8. 30 μg CA005562 | Day 1: Single ICV Injection | n = 4 |
| 9. 100 μg CA005562 | Day 1: Single ICV Injection | n = 4 |
| 10. 300 μg CA005562 | Day 1: Single ICV Injection | n = 4 |

*CA005562 is an antisense oligonucleotide having the sequence mCMs, TM, mCM, AM, GMs, dTs, dAs, dAs, mdCs, dAs, dTs, dTs, dGs, dAs, mdCs, AM, mCM, mCM, AMs, mCM, wherein mC is a 5-methyl cytosine nucleobase, M is a 2′-MOE sugar moiety, dN is a deoxy nucleotide, and s is a phosphorothioate nucleoside linkage; see PCT Publication WO2021/168183

[0452] Each of the HTT RNAi agents included modified nucleotides that were conjugated at the 5′ terminal end of the sense strand to a targeting ligand that included a lipid moiety or antigen binding moiety having the modified sequences as set forth in the duplex structures herein. (See Tables 3, 4, 5, 6, 7, 8, 9, and 10 for specific modifications and structure information related to the HTT RNAi agents, including the lipid and antigen binding moieties).

[0453] On Day 29, the mice were euthanized. From the mice, right half of the brain and thoracic spinal cord were harvested and collected for analysis.

[0454] HTT protein expression was analyzed via Jess protein assay in the cortex and striatum, normalized to Group 1 mice dosed with aCSF. HTT protein was quantified using Anti-Polyglutamine-Expansion Diseases Marker Antibody (Sigma-Aldrich®, Cat. MAB1574). The HTT expression data is shown in the following Table 38.

TABLE 38
HTT protein expression in mice brain tissues of Example 15.

| | Day 29 | | | |
|---|---|---|---|---|
| | MAB1574 | | | |
| | Cortex | | Striatum | |
| | Rel Exp | | Rel Exp | |
| Group ID | HTT | Std Dev+/− | HTT | Std Dev+/− |
| 1. aCSF | 0.989 | 0.074 | 1.000 | 0.043 |
| 2. 30 μg AC006707 | 0.670 | 0.206 | 0.554 | 0.134 |
| 3. 100 μg AC006707 | 0.422 | 0.083 | 0.356 | 0.085 |
| 4. 300 μg AC006707 | 0.284 | 0.156 | 0.251 | 0.094 |
| 5. 30 μg AC004593 | 0.844 | 0.127 | 0.939 | 0.086 |
| 6. 100 μg AC004593 | 0.770 | 0.100 | 0.684 | 0.120 |
| 7. 300 μg AC004593 | 0.745 | 0.205 | 0.683 | 0.142 |
| 8. 30 μg CA005562 | 0.905 | 0.195 | 0.768 | 0.148 |
| 9. 100 μg CA005562 | 0.611 | 0.101 | 0.629 | 0.063 |
| 10. 300 μg CA005562 | 0.545 | 0.000 | 0.507 | 0.109 |

[0455] In the cortex, Groups 2-4, 6, 7, 9, and 10 showed significant reduction in HTT protein; Groups 5 and 8 showed negligible HTT reduction. Most notably, in the cortex, a single dose 300 μg AC006707 achieved ˜72% HTT protein inhibition (0.284). A dose response was observed for AC006707, AC004593, and CA005562.

[0456] In the striatum, Groups 2-4 and 6-10 showed reduction in HTT protein; Group 5 showed negligible HTT reduction. Most notably, in the striatum, a single dose of 300 μg of AC006707 achieved ˜75% HTT protein inhibition (0.251). A dose response was observed for AC006707, AC004593, and CA005562.

[0457] In both the cortex and striatum, AC006707 achieved superior HTT protein reduction in comparison to AC004593 and CA005562, at each respective dose (30 μg, 100 μg, 300 μg).

### Example 16. In Vivo Administration of HTT RNAi Agents in YAC128 Mice

[0458] HTT RNAi agents were evaluated in vivo in mice. On Day 1, four (n=4) FVB-Tg(YAC128)53Hay/J mice (2 male, 2 female) for each group were dosed, via intracerebroventricular (ICV) injection, with HTT RNAi agents formulated in artificial cerebrospinal fluid (aCSF) (at 0.07 mg total HTT RNAi agent) or with aCSF. The HTT RNAi agents were formulated at 7 mg/mL at 10 μL total injection volume. The dosing was in accordance with the following Table 39.

[0459] FVB-Tg(YAC 128)53Hay/J mice (common name: “YAC 128” mice) express the human huntingtin protein.

TABLE 39
Dosing for mice of Example 16.

| Group ID | Dose (RNAi Agent) | # of Animals |
|---|---|---|
| 1. aCSF | Day 1: Single ICV Injection | n = 4 |
| 2. 0.07 mg AC005500 | Day 1: Single ICV Injection | n = 4 |
| 3. 0.07 mg AC006704 | Day 1: Single ICV Injection | n = 4 |
| 4. 0.07 mg AC006705 | Day 1: Single ICV Injection | n = 4 |
| 5. 0.07 mg AC006706 | Day 1: Single ICV Injection | n = 4 |
| 6. 0.07 mg AC005511 | Day 1: Single ICV Injection | n = 4 |
| 7. 0.07 mg AC006707 | Day 1: Single ICV Injection | n = 4 |
| 8. 0.07 mg AC006708 | Day 1: Single ICV Injection | n = 4 |
| 9. 0.07 mg AC006709 | Day 1: Single ICV Injection | n = 4 |
| 10. 0.07 mg AC005522 | Day 1: Single ICV Injection | n = 4 |
| 11. 0.07 mg AC005524 | Day 1: Single ICV Injection | n = 4 |
| 12. 0.07 mg AC006805 | Day 1: Single ICV Injection | n = 4 |
| 13. 0.07 mg AC006806 | Day 1: Single ICV Injection | n = 4 |
| 14. 0.07 mg AC006807 | Day 1: Single ICV Injection | n = 4 |

[0460] Each of the HTT RNAi agents included modified nucleotides that were conjugated at the 5′ terminal end of the sense strand to a targeting ligand that included a lipid moiety or antigen binding moiety having the modified sequences as set forth in the duplex structures herein. (See Tables 3, 4, 5, 6, 7, 8, 9, and 10 for specific modifications and structure information related to the HTT RNAi agents, including the lipid and antigen binding moieties).

[0461] On Day 29, the mice were euthanized. From the mice, right half of the brain and thoracic spinal cord were harvested and collected for analysis.

[0462] HTT protein expression was analyzed via Jess protein assay in the cortex, normalized to Group 1 mice dosed with aCSF. HTT protein was quantified using Anti-Polyglutamine-Expansion Diseases Marker Antibody (Sigma-Aldrich®, Cat. MAB1574). The HTT expression data is shown in the following Table 40.

TABLE 40
HTT protein expression in mice brain tissues of Example 16.

| | Day 29 | | | |
|---|---|---|---|---|
| | MAB1574 | | | |
| | Cortex | | Striatum | |
| | Rel Exp | | Rel Exp | |
| Group ID | HTT | Std Dev+/− | HTT | Std Dev+/− |
| 1. aCSF | 1.000 | 0.120 | 1.000 | 0.066 |
| 2. 0.07 mg AC005500 | 0.552 | 0.093 | 0.699 | 0.066 |
| 3. 0.07 mg AC006704 | 0.470 | 0.132 | 0.683 | 0.120 |
| 4. 0.07 mg AC006705 | 0.528 | 0.115 | 0.641 | 0.117 |
| 5. 0.07 mg AC006706 | 0.540 | 0.076 | 0.643 | 0.102 |
| 6. 0.07 mg AC005511 | 0.299 | 0.093 | 0.400 | 0.060 |
| 7. 0.07 mg AC006707 | 0.329 | 0.097 | 0.356 | 0.062 |
| 8. 0.07 mg AC006708 | 0.404 | 0.112 | 0.526 | 0.176 |
| 9. 0.07 mg AC006709 | 0.391 | 0.097 | 0.470 | 0.053 |
| 10. 0.07 mg AC005522 | 0.465 | 0.136 | 0.358 | 0.100 |
| 11. 0.07 mg AC005524 | 0.361 | 0.066 | 0.430 | 0.114 |
| 12. 0.07 mg AC006805 | 0.363 | 0.068 | 0.465 | 0.046 |
| 13. 0.07 mg AC006806 | 0.339 | 0.046 | 0.553 | 0.036 |
| 14. 0.07 mg AC006807 | 0.454 | 0.172 | 0.419 | 0.043 |

[0463] In the cortex and striatum, Groups 2-14 showed reduction in HTT protein. Most notably, in the cortex, a single dose 0.07 mg AC005511 achieved ˜70% HTT protein inhibition (0.299). Also notably, in the striatum, a single dose 0.07 mg AC006707 achieved ˜-64% HTT protein inhibition (0.356).

### Example 17. In Vivo Administration of HTT RNAi Agents in Cynomolgus Monkeys

[0464] HTT RNAi agents were evaluated in vivo in Cynomolgus monkeys. On Days 1, 8, and 15, four (n=4) male Cynomolgus monkeys for each test group were dosed with HTT RNAi agents formulated in PBS at 3.0 mg/kg (adjusted for individual animal body weight), 2.0 ml/kg dose volume, at 1.5 mg/ml dose concentration, or dosed with PBS. Each dose was administered via subcutaneous (SC) injection, and each dose was administered based on each respective animal's most recent body weight. The dosing was in accordance with the following Table 41.

TABLE 41
Dosing for Cynomolgus monkeys of Example 17.

| Group ID, Dose | Dose | | Dose | # of Animals |
|---|---|---|---|---|
| (RNAi Agent) | Volume | Dosing Route | Concentration | (n=) |
| 1. PBS | N/A | SC Injection | N/A | n = 4 |
| 2. 3.0 mg/kg AC007867 | 2.0 ml/kg | SC Injection | 1.5 mg/ml | n = 4 |
| 3. 3.0 mg/kg AC007952 | 2.0 ml/kg | SC Injection | 1.5 mg/ml | n = 4 |
| 4. 3.0 mg/kg AC007953 | 2.0 ml/kg | SC Injection | 1.5 mg/ml | n = 4 |
| 5. 3.0 mg/kg AC007865 | 2.0 ml/kg | SC Injection | 1.5 mg/ml | n = 4 |

[0465] The test animals were of non-human primate, Cynomolgus fascicularis monkeys, male, non-naïve, aged 3-5 years. The test animals were acclimated to laboratory housing, per facility and acclimation standard operating procedures, for at least 14 days prior to the initiation of dosing. The RNAi agent test articles were administered via subcutaneous (SC) administration with a syringe and needle in the mid-scapular region.

[0466] Dose sites were shaved prior to dosing. Day 1 dose was delivered to the animals' left scapular region, Day 8 dose was delivered to the right scapular region, and Day 15 dose was delivered to the left scapular region. Each dose was given using syringe with a 23-25 gauge needle.

[0467] The test animals' individual body weights were recorded once pre-treatment Day −7, and then weekly through the duration of the study, and once prior to necropsy.

[0468] Cerebrospinal fluid (CSF), ˜0.5 mL, was collected on Day−7 for all Groups. On Day 43 (day of necropsy), ˜2.0 mL CSF was collected for all Groups. For the CSF collection procedure, all test animals were anesthetized by intravenous (N) injection of ketamine (10 mg/kg, IV) and dexmedetomidine (0.02 mg/kg, intramuscular IM) and positioned in lateral recumbency. The skin covering the insertion point was shaved and wiped several times with individual chlorhexidine scrubs. The head of the animal was gently flexed to where the chin nearly touches the chest, but the airway was not obstructed. The professional palpated the occipital protuberance and wings of the atlas (C₁). The needle was inserted perpendicularly above the atlas through the skin to access the subarachnoid space. If the bone was encountered, the needle was redirected either anteriorly or posteriorly until the designated access point was found. The CSF would flow freely through the needle once the proper placement has been achieved and collected into a cryotube tube. The needle was removed, and direct pressure was applied to the puncture site for at least two minutes. Once the procedure was complete, the animals were administered Carprofen 2-4 mg/kg SC every 12 hours for 1 day. Atipamezole (0.225 mg/kg, IM), was administered if necessary.

[0469] At Day 43, the Cynomolgus monkeys were euthanized. From the test animals, the following tissues were collected: left and right brain hemisphere, spinal cord, dorsal root ganglion (DRG). Tissues other than the aforementioned tissues may also be collected, and should such extra tissues be collected, their biological data were similarly presented below. The collected tissues were analyzed for biological parameters.

[0470] From the collected tissues, cHTT mRNA transcript levels were quantified via gPCR, with cPPIB as endogenous control gene, normalized to Group 1 animals dosed with PBS. The cHTT expression data is shown in the following Table 42.

TABLE 42
cHTT expression in tissues of Example 17.

| | Day 43 | | | | | |
|---|---|---|---|---|---|---|
| | Temporal Cortex | | | Frontal Cortex | | |
| | Rel Exp | Error | Error | Rel Exp | Error | Error |
| Group ID | HTT | Low | High | HTT | Low | High |
| 1. PBS | 1.000 | 0.169 | 0.203 | 1.000 | 0.161 | 0.192 |
| 2. 3.0 mg/kg AC007867 | 0.331 | 0.063 | 0.078 | 0.333 | 0.056 | 0.067 |
| 3. 3.0 mg/kg AC007952 | 0.557 | 0.055 | 0.060 | 0.442 | 0.073 | 0.088 |
| 4. 3.0 mg/kg AC007953 | 0.518 | 0.077 | 0.090 | 0.503 | 0.065 | 0.074 |
| 5. 3.0 mg/kg AC007865 | 0.408 | 0.102 | 0.137 | 0.358 | 0.055 | 0.065 |
| | Motor Cortex | | | Caudate | | |
| | Rel Exp | Error | Error | Rel Exp | Error | Error |
| Group ID | HTT | Low | High | HTT | Low | High |
| 1. PBS | 1.000 | 0.235 | 0.307 | 1.000 | 0.165 | 0.198 |
| 2. 3.0 mg/kg AC007867 | 0.393 | 0.072 | 0.088 | 0.413 | 0.072 | 0.087 |
| 3. 3.0 mg/kg AC007952 | 0.557 | 0.112 | 0.141 | 0.475 | 0.079 | 0.095 |
| 4. 3.0 mg/kg AC007953 | 0.775 | 0.099 | 0.114 | 0.424 | 0.060 | 0.069 |
| 5. 3.0 mg/kg AC007865 | 0.405 | 0.061 | 0.072 | 0.340 | 0.079 | 0.102 |
| | Putamen | | | Hippocampus | | |
| | Rel Exp | Error | Error | Rel Exp | Error | Error |
| Group ID | HTT | Low | High | HTT | Low | High |
| 1. PBS | 1.000 | 0.106 | 0.119 | 1.000 | 0.164 | 0.196 |
| 2. 3.0 mg/kg AC007867 | 0.411 | 0.030 | 0.032 | 0.306 | 0.071 | 0.092 |
| 3. 3.0 mg/kg AC007952 | 0.795 | 0.100 | 0.114 | 0.515 | 0.089 | 0.108 |
| 4. 3.0 mg/kg AC007953 | 0.698 | 0.083 | 0.095 | 0.498 | 0.062 | 0.071 |
| 5. 3.0 mg/kg AC007865 | 0.456 | 0.068 | 0.080 | 0.302 | 0.044 | 0.051 |

| | Cerebellum | | |
|---|---|---|---|
| | Rel Exp | Error | Error |
| Group ID | HTT | Low | High |
| 1. PBS | 1.000 | 0.357 | 0.556 |
| 2. 3.0 mg/kg AC007867 | 0.883 | 0.307 | 0.471 |
| 3. 3.0 mg/kg AC007952 | 0.989 | 0.167 | 0.201 |
| 4. 3.0 mg/kg AC007953 | 1.168 | 0.188 | 0.224 |
| 5. 3.0 mg/kg AC007865 | 0.795 | 0.266 | 0.401 |

[0471] In the temporal cortex, frontal cortex, motor cortex, caudate, hippocampus, Groups 2-5 showed reduction in HTT transcripts out to at least Day 43 post dose. In the putamen, Groups 2, 4, and 5 showed reduction in HTT transcripts out to at least Day 43 post dose. Most notably, the most significant HTT transcript reduction was seen in the hippocampus, three doses of 3.0 mg/kg AC007867 showed ˜69% HTT transcript inhibition (0.306), and three doses of 3.0 mg/kg AC007865 showed ˜70% HTT transcript inhibition (0.302).

[0472] HTT protein expression was analyzed via Jess protein assay in the tissues, normalized to Group 1 animals dosed with PBS. HTT protein was quantified using Anti-Huntingtin Protein Antibody (Sigma-Aldrich®, Cat. MAB2166). The HTT protein expression data is shown in the following Table 43.

TABLE 43
HTT protein expression in tissues of Example 17.

| | Day 43 | | | | | |
|---|---|---|---|---|---|---|
| | Temporal Cortex | | Frontal Cortex | | Motor Cortex | |
| | Rel Exp | Std | Rel Exp | Std | Rel Exp | Std |
| Group ID | HTT | Dev+/− | HTT | Dev+/− | HTT | Dev+/− |
| 1. PBS | 1.000 | 0.103 | 1.000 | 0.019 | 1.000 | 0.130 |
| 2. 3.0 mg/kg AC007867 | 0.160 | 0.041 | 0.171 | 0.016 | 0.143 | 0.025 |
| 3. 3.0 mg/kg AC007952 | 0.486 | 0.057 | 0.390 | 0.031 | 0.336 | 0.027 |
| 4. 3.0 mg/kg AC007953 | 0.407 | 0.056 | 0.353 | 0.092 | 0.287 | 0.034 |
| 5. 3.0 mg/kg AC007865 | 0.189 | 0.030 | 0.168 | 0.058 | 0.146 | 0.033 |
| | Caudate | | Putamen | | Hippocampus | |
| | Rel Exp | Std | Rel Exp | Std | Rel Exp | Std |
| Group ID | HTT | Dev+/− | HTT | Dev+/− | HTT | Dev+/− |
| 1. PBS | 1.000 | 0.082 | 1.000 | 0.090 | 1.000 | 0.050 |
| 2. 3.0 mg/kg AC007867 | 0.176 | 0.027 | 0.178 | 0.059 | 0.179 | 0.034 |
| 3. 3.0 mg/kg AC007952 | 0.407 | 0.102 | 0.520 | 0.120 | 0.479 | 0.076 |
| 4. 3.0 mg/kg AC007953 | 0.346 | 0.079 | 0.432 | 0.125 | 0.468 | 0.031 |
| 5. 3.0 mg/kg AC007865 | 0.198 | 0.044 | 0.199 | 0.041 | 0.201 | 0.015 |

| | Cerebellum | |
|---|---|---|
| | Rel Exp | Std |
| Group ID | HTT | Dev+/− |
| 1. PBS | 1.000 | 0.191 |
| 2. 3.0 mg/kg AC007867 | 0.655 | 0.049 |
| 3. 3.0 mg/kg AC007952 | 0.704 | 0.154 |
| 4. 3.0 mg/kg AC007953 | 0.659 | 0.082 |
| 5. 3.0 mg/kg AC007865 | 0.636 | 0.192 |

[0473] In the temporal cortex, frontal cortex, motor cortex, caudate, putamen, hippocampus, and cerebellum, Groups 2-5 showed reduction in HTT protein out to at least Day 43 post dose. Most notably, the most significant HTT protein reduction is seen in the motor cortex, three doses of 3.0 mg/kg AC007867 showed ˜86% HTT protein inhibition (0.143), and three doses of 3.0 mg/kg AC007865 showed ˜85% HTT protein inhibition (0.146).

### Example 18. In Vivo Administration of HTT RNAi Agents in Cynomolgus Monkeys

[0474] HTT RNAi agents were evaluated in vivo in Cynomolgus monkeys. On Days 1, 8, and 15, four (n=4) male Cynomolgus monkeys for each test group were dosed with HTT RNAi agents formulated in PBS at 0.3 mg/kg, 1.0 mg/kg, or 3.0 mg/kg (mass of oligo per animal body weight-Fab not included in mass calculation; adjusted for individual animal body weight), 2.0 ml/kg dose volume, at 1.5 mg/ml, 0.5 mg/ml, or 0.15 mg/ml dose concentration, or dosed with PBS. Each dose was administered via subcutaneous (SC) injection, and each dose was administered based on each respective animal's most recent body weight. The dosing was in accordance with the following Table 44.

TABLE 44
Dosing for Cynomolgus monkeys of Example 18.

| Group ID, Dose | | Sacrifice | # of Animals |
|---|---|---|---|
| (RNAi Agent) | Dosing Route | Day | (n=) |
| 1. PBS | SC Injection on Day 1, 8, 15 | Day 43 | n = 4 |
| 2. 0.3 mg/kg AC007867 | SC Injection on Day 1, 8, 15 | Day 43 | n = 4 |
| 3. 1.0 mg/kg AC007867 | SC Injection on Day 1, 8, 15 | Day 43 | n = 4 |
| 4. 3.0 mg/kg AC007867 | SC Injection on Day 1, 8, 15 | Day 43 | n = 4 |
| 5. 3.0 mg/kg AC007867 | SC Injection on Day 1 | Day 29 | n = 4 |
| 6. 3.0 mg/kg AC007867 | SC Injection on Day 1, 8, 15 | Day 92* | n = 4 |

[0475] Each animal from Groups 1-4 and 6 were dosed on Day 1, 8, and 15, while Group 5 animals were dosed on only Day 1. The RNAi agent test articles were administered via subcutaneous (SC) administration with a syringe and needle in the mid-scapular region. Dose sites were shaved before dosing and remarked as necessary throughout the study. Dose one (on Day 1) was delivered to the animal's left scapular region, dose two (on Day 8) was delivered to the right scapular region, and dose three (on Day 15) was delivered to the left scapular region. Each subcutaneous dose was delivered using a syringe with 23-25-gauze needle.

[0476] The test animals' individual body weights were recorded once pre-treatment Day−7, and then weekly through the duration of the study, and once prior to necropsy.

[0477] Cerebrospinal fluid (CSF), (˜1.0 mL), was collected on Day−7 and on day of necropsy for all Groups. CSF (˜2.0 mL), was collected for all the groups from the lumbar region (lumbar puncture). For Group 1 only, another ˜2.0 ml of CSF was collected (Terminal collection). For the CSF collection procedure, animals were sedated using a combination of ketamine (5-10 mg/Kg-IM) and dexmedetomidine (0.05 mg/Kg-IM) and positioned in lateral recumbency. Under sterile surgical material and strict aseptic technique, a Gertie Marx Needle (22G×50 mm) was inserted through the dura mater/arachnoid membrane. 2.0 ml (or 0.5 mL) of CSF was collected via freely flow through the needle. The needle was removed after CSF collection. Once the procedure was complete, the animals were administered 2-4 mg/kg of Carprofen subcutaneously every 12 hours for 1 day. Atipamezole (0.225 mg/kg, IM), was administered if necessary.

[0478] At Day 29, 43, or 92, the Cynomolgus monkeys were euthanized, in accordance with Table 44. From the test animals, the following tissues were collected: left and right brain hemisphere, spinal cord, dorsal root ganglion (DRG). Tissues other than the aforementioned tissues may also be collected, and should such extra tissues be collected, their biological data were similarly presented below. The collected tissues were analyzed for biological parameters.

[0479] From the collected tissues, cHTT mRNA transcript levels were quantified via gPCR, with cPPIB as endogenous control gene, normalized to Group 1 animals dosed with PBS. The cHTT expression data is shown in the following Table 45 and Table 46.

TABLE 45
cHTT mRNA transcript expression in tissues of Example 18.

| | Frontal Cortex | | | Temporal Cortex | | |
|---|---|---|---|---|---|---|
| | Rel Exp | Error | Error | Rel Exp | Error | Error |
| Group ID | HTT | Low | High | HTT | Low | High |
| 1. PBS, D 43 | 1.000 | 0.272 | 0.374 | 1.000 | 0.204 | 0.257 |
| 2. 3 × 0.3 mg/kg AC007867, D 43 | 0.968 | 0.051 | 0.054 | 0.576 | 0.136 | 0.179 |
| 3. 3 × 1.0 mg/kg AC007867, D 43 | 0.753 | 0.139 | 0.171 | 0.310 | 0.087 | 0.121 |
| 4. 3 × 3.0 mg/kg AC007867, D 43 | 0.480 | 0.125 | 0.170 | 0.218 | 0.057 | 0.077 |
| 5. 1 × 3.0 mg/kg AC007867, D 29 | 0.821 | 0.085 | 0.095 | 0.528 | 0.061 | 0.069 |
| | Caudate | | | Putamen | | |
| | Rel Exp | Error | Error | Rel Exp | Error | Error |
| Group ID | HTT | Low | High | HTT | Low | High |
| 1. PBS, D 43 | 1.000 | 0.198 | 0.248 | 1.000 | 0.078 | 0.085 |
| 2. 3 × 0.3 mg/kg AC007867, D 43 | 0.958 | 0.082 | 0.089 | 0.732 | 0.068 | 0.075 |
| 3. 3 × 1.0 mg/kg AC007867, D 43 | 0.720 | 0.229 | 0.336 | 0.474 | 0.128 | 0.176 |
| 4. 3 × 3.0 mg/kg AC007867, D 43 | 0.447 | 0.120 | 0.164 | 0.403 | 0.041 | 0.046 |
| 5. 1 × 3.0 mg/kg AC007867, D 29 | 0.529 | 0.088 | 0.106 | 0.474 | 0.098 | 0.123 |

[0480] In the frontal cortex, Groups 3 and 4 showed reduction in HTT transcripts. In the temporal cortex and putamen, Groups 2-5 showed reduction in HTT transcripts. In the caudate, Groups 3-5 showed reduction in HTT transcripts. Most notably, the most significant HTT transcript reduction was seen in the temporal cortex, three doses of 3.0 mg/kg AC007867 achieved ˜78% HTT transcript inhibition (0.218) at Day 43. At Day 43, a dose-response was observed for AC007867 (Groups 2-4) in all of the CNS tissues.

[0481] In the temporal cortex, caudate, and putamen, a single dose of 3.0 mg/kg showed reduction in HTT transcripts out to at least Day 29. Notably, a single dose 3.0 mg/kg AC007867 achieved ˜53% HTT transcript inhibition (0.474) out to at least Day 29 in the putamen.

TABLE 46
cHTT mRNA transcript expression in tissues of Example 18.

| | Frontal Cortex | | | Temporal Cortex | | |
|---|---|---|---|---|---|---|
| | Rel Exp | Error | Error | Rel Exp | Error | Error |
| Group ID | HTT | Low | High | HTT | Low | High |
| 1. PBS, D 43 | 1.000 | 0.292 | 0.412 | 1.000 | 0.216 | 0.275 |
| 6. 3 × 3.0 mg/kg AC007867, D 92 | 0.661 | 0.088 | 0.101 | 0.539 | 0.093 | 0.112 |
| | Caudate | | | Putamen | | |
| | Rel Exp | Error | Error | Rel Exp | Error | Error |
| Group ID | HTT | Low | High | HTT | Low | High |
| 1. PBS, D 43 | 1.000 | 0.179 | 0.219 | 1.000 | 0.094 | 0.104 |
| 6. 3 × 3.0 mg/kg AC007867, D 92 | 0.605 | 0.097 | 0.116 | 0.664 | 0.099 | 0.116 |

[0482] In the frontal cortex, temporal cortex, caudate, and putamen, three doses of 3.0 mg/kg showed reduction in HTT transcripts out to at least Day 92. Notably, a single dose 3.0 mg/kg AC007867 achieved ˜46% HTT transcript inhibition (0.539) out to at least Day 92 in the temporal cortex.

[0483] HTT protein expression was analyzed via Jess protein assay in the tissues, normalized to Group 1 animals dosed with PBS. HTT protein was quantified using Anti-Huntingtin Protein Antibody (Sigma-Aldrich®, Cat. MAB2166). The HTT protein expression data is shown in the following Table 47.

TABLE 47
HTT protein expression in tissues of Example 18.

| | | MAB2166 | | | |
|---|---|---|---|---|---|
| | | Temporal Cortex | | Frontal Cortex | |
| | | Rel. Exp. | | Rel. Exp. | |
| Group ID | Sac Day | HTT | Std. Dev+/− | HTT | Std. Dev+/− |
| 1. PBS | Day 43 | 1.000 | 0.075 | 1.000 | 0.039 |
| 2. 3 × 0.3 mg/kg AC007867 | Day 43 | 0.753 | 0.135 | 0.606 | 0.169 |
| 3. 3 × 1.0 mg/kg AC007867 | Day 43 | 0.437 | 0.039 | 0.382 | 0.039 |
| 4. 3 × 3.0 mg/kg AC007867 | Day 43 | 0.174 | 0.076 | 0.164 | 0.030 |
| 5. 1 × 3.0 mg/kg AC007867 | Day 29 | 0.453 | 0.023 | 0.521 | 0.124 |
| 6. 3 × 3.0 mg/kg AC007867 | Day 92 | 0.355 | 0.077 | 0.338 | 0.097 |
| | | Caudate | | Putamen | |
| | | Rel. Exp. | | Rel. Exp. | |
| Group ID | Sac Day | HTT | Std. Dev+/− | HTT | Std. Dev+/− |
| 1. PBS | Day 43 | 1.000 | 0.039 | 1.000 | 0.084 |
| 2. 3 × 0.3 mg/kg AC007867 | Day 43 | 0.747 | 0.255 | 0.776 | 0.183 |
| 3. 3 × 1.0 mg/kg AC007867 | Day 43 | 0.425 | 0.076 | 0.467 | 0.140 |
| 4. 3 × 3.0 mg/kg AC007867 | Day 43 | 0.242 | 0.023 | 0.245 | 0.031 |
| 5. 1 × 3.0 mg/kg AC007867 | Day 29 | 0.482 | 0.038 | 0.462 | 0.056 |
| 6. 3 × 3.0 mg/kg AC007867 | Day 92 | 0.413 | 0.137 | 0.448 | 0.123 |

[0484] HTT RNAi agent AC007867 achieved HTT protein knockdown out to at least Day 92 in the temporal cortex, frontal cortex, caudate, and putamen with 3× doses. A single dose 3.0 mg/kg AC007867 achieved HTT protein knockdown out to at least Day 29. The most notable and significant knockdown was observed in the frontal cortex, with 3× 3.0 mg/kg subcutaneous (SC) doses achieving ˜84% HTT protein inhibition (0.164) on Day 43. A dose response was observed for RNAi agent AC007867 in the temporal cortex, frontal cortex, caudate, and putamen.

### OTHER EMBODIMENTS

[0485] It is to be understood that while the invention has been described in conjunction with the detailed description thereof, the foregoing description is intended to illustrate and not limit the scope of the invention, which is defined by the scope of the appended claims. Other aspects, advantages, and modifications are within the scope of the following claims.

The application's sequence listing, which the Patent Office published only in electronic form, follows.

SEQUENCE LISTING (980 sequences)

SEQ ID NO: 1 - RNA, 13498 nt, Homo sapiens
  source 1..13498: mol_type = mRNA
gctgccgggacgggtccaagatggacggccgctcaggttctgcttttacctgcggcccagagccccattcattgccccggtgctgagcggcgccgcgagtcggcccgaggcctccggggactgccgtgccgggcgggagaccgccatggcgaccctggaaaagctgatgaaggccttcgagtccctcaagtccttccagcagcagcagcagcagcagcagcagcagcagcagcagcagcagcagcagcagcagcagcagcaacagccgccaccgccgccgccgccgccgccgcctcctcagcttcctcagccgccgccgcaggcacagccgctgctgcctcagccgcagccgcccccgccgccgcccccgccgccacccggcccggctgtggctgaggagccgctgcaccgaccaaagaaagaactttcagctaccaagaaagaccgtgtgaatcattgtctgacaatatgtgaaaacatagtggcacagtctgtcagaaattctccagaatttcagaaacttctgggcatcgctatggaactttttctgctgtgcagtgatgacgcagagtcagatgtcaggatggtggctgacgaatgcctcaacaaagttatcaaagctttgatggattctaatcttccaaggttacagctcgagctctataaggaaattaaaaagaatggtgcccctcggagtttgcgtgctgccctgtggaggtttgctgagctggctcacctggttcggcctcagaaatgcaggccttacctggtgaaccttctgccgtgcctgactcgaacaagcaagagacccgaagaatcagtccaggagaccttggctgcagctgttcccaaaattatggcttcttttggcaattttgcaaatgacaatgaaattaaggttttgttaaaggccttcatagcgaacctgaagtcaagctcccccaccattcggcggacagcggctggatcagcagtgagcatctgccagcactcaagaaggacacaatatttctatagttggctactaaatgtgctcttaggcttactcgttcctgtcgaggatgaacactccactctgctgattcttggcgtgctgctcaccctgaggtatttggtgcccttgctgcagcagcaggtcaaggacacaagcctgaaaggcagcttcggagtgacaaggaaagaaatggaagtctctccttctgcagagcagcttgtccaggtttatgaactgacgttacatcatacacagcaccaagaccacaatgttgtgaccggagccctggagctgttgcagcagctcttcagaacgcctccacccgagcttctgcaaaccctgaccgcagtcgggggcattgggcagctcaccgctgctaaggaggagtctggtggccgaagccgtagtgggagtattgtggaacttatagctggagggggttcctcatgcagccctgtcctttcaagaaaacaaaaaggcaaagtgctcttaggagaagaagaagccttggaggatgactctgaatcgagatcggatgtcagcagctctgccttaacagcctcagtgaaggatgagatcagtggagagctggctgcttcttcaggggtttccactccagggtcagcaggtcatgacatcatcacagaacagccacggtcacagcacacactgcaggcggactcagtggatctggccagctgtgacttgacaagctctgccactgatggggatgaggaggatatcttgagccacagctccagccaggtcagcgccgtcccatctgaccctgccatggacctgaatgatgggacccaggcctcgtcgcccatcagcgacagctcccagaccaccaccgaagggcctgattcagctgttaccccttcagacagttctgaaattgtgttagacggtaccgacaaccagtatttgggcctgcagattggacagccccaggatgaagatgaggaagccacaggtattcttcctgatgaagcctcggaggccttcaggaactcttccatggcccttcaacaggcacatttattgaaaaacatgagtcactgcaggcagccttctgacagcagtgttgataaatttgtgttgagagatgaagctactgaaccgggtgatcaagaaaacaagccttgccgcatcaaaggtgacattggacagtccactgatgatgactctgcacctcttgtccattgtgtccgccttttatctgcttcgtttttgctaacagggggaaaaaatgtgctggttccggacagggatgtgagggtcagcgtgaaggccctggccctcagctgtgtgggagcagctgtggccctccacccggaatctttcttcagcaaactctataaagttcctcttgacaccacggaataccctgaggaacagtatgtctcagacatcttgaactacatcgatcatggagacccacaggttcgaggagccactgccattctctgtgggaccctcatctgctccatcctcagcaggtcccgcttccacgtgggagattggatgggcaccattagaaccctcacaggaaatacattttctttggcggattgcattcctttgctgcggaaaacactgaaggatgagtcttctgttacttgcaagttagcttgtacagctgtgaggaactgtgtcatgagtctctgcagcagcagctacagtgagttaggactgcagctgatcatcgatgtgctgactctgaggaacagttcctattggctggtgaggacagagcttctggaaacccttgcagagattgacttcaggctggtgagctttttggaggcaaaagcagaaaacttacacagaggggctcatcattatacagggcttttaaaactgcaagaacgagtgctcaataatgttgtcatccatttgcttggagatgaagaccccagggtgcgacatgttgccgcagcatcactaattaggcttgtcccaaagctgttttataaatgtgaccaaggacaagctgatccagtagtggccgtggcaagagatcaaagcagtgtttacctgaaacttctcatgcatgagacgcagcctccatctcatttctccgtcagcacaataaccagaatatatagaggctataacctactaccaagcataacagacgtcactatggaaaataacctttcaagagttattgcagcagtttctcatgaactaatcacatcaaccaccagagcactcacatttggatgctgtgaagctttgtgtcttctttccactgccttcccagtttgcatttggagtttaggttggcactgtggagtgcctccactgagtgcctcagatgagtctaggaagagctgtaccgttgggatggccacaatgattctgaccctgctctcgtcagcttggttcccattggatctctcagcccatcaagatgctttgattttggccggaaacttgcttgcagccagtgctcccaaatctctgagaagttcatgggcctctgaagaagaagccaacccagcagccaccaagcaagaggaggtctggccagccctgggggaccgggccctggtgcccatggtggagcagctcttctctcacctgctgaaggtgattaacatttgtgcccacgtcctggatgacgtggctcctggacccgcaataaaggcagccttgccttctctaacaaaccccccttctctaagtcccatccgacgaaaggggaaggagaaagaaccaggagaacaagcatctgtaccgttgagtcccaagaaaggcagtgaggccagtgcagcttctagacaatctgatacctcaggtcctgttacaacaagtaaatcctcatcactggggagtttctatcatcttccttcatacctcaaactgcatgatgtcctgaaagctacacacgctaactacaaggtcacgctggatcttcagaacagcacggaaaagtttggagggtttctccgctcagccttggatgttctttctcagatactagagctggccacactgcaggacattgggaagtgtgttgaagagatcctaggatacctgaaatcctgctttagtcgagaaccaatgatggcaactgtttgtgttcaacaattgttgaagactctctttggcacaaacttggcctcccagtttgatggcttatcttccaaccccagcaagtcacaaggccgagcacagcgccttggctcctccagtgtgaggccaggcttgtaccactactgcttcatggccccgtacacccacttcacccaggccctcgctgacgccagcctgaggaacatggtgcaggcggagcaggagaacgacacctcgggatggtttgatgtcctccagaaagtgtctacccagttgaagacaaacctcacgagtgtcacaaagaaccgtgcagataagaatgctattcataatcacattcgtttgtttgaacctcttgttataaaagctttaaaacagtacacgactacaacatgtgtgcagttacagaagcaggttttagatttgctggcgcagctggttcagttacgggttaattactgtcttctggattcagatcaggtgtttattggctttgtattgaaacagtttgaatacattgaagtgggccagttcagggaatcagaggcaatcattccaaacatctttttcttcttggtattactatcttatgaacgctatcattcaaaacagatcattggaattcctaaaatcattcagctctgtgatggcatcatggccagtggaaggaaggctgtgacacatgccataccggctctgcagcccatagtccacgacctctttgtattaagaggaacaaataaagctgatgcaggaaaagagcttgaaacccaaaaagaggtggtggtgtcaatgttactgagactcatccagtaccatcaggtgttggagatgttcattcttgtcctgcagcagtgccacaaggagaatgaagacaagtggaagcgactgtctcgacagatagctgacatcatcctcccaatgttagccaaacagcagatgcacattgactctcatgaagcccttggagtgttaaatacattatttgagattttggccccttcctccctccgtccggtagacatgcttttacggagtatgttcgtcactccaaacacaatggcgtccgtgagcactgttcaactgtggatatcgggaattctggccattttgagggttctgatttcccagtcaactgaagatattgttctttctcgtattcaggagctctccttctctccgtatttaatctcctgtacagtaattaataggttaagagatggggacagtacttcaacgctagaagaacacagtgaagggaaacaaataaagaatttgccagaagaaacattttcaaggtttctattacaactggttggtattcttttagaagacattgttacaaaacagctgaaggtggaaatgagtgagcagcaacatactttctattgccaggaactaggcacactgctaatgtgtctgatccacatcttcaagtctggaatgttccggagaatcacagcagctgccactaggctgttccgcagtgatggctgtggcggcagtttctacaccctggacagcttgaacttgcgggctcgttccatgatcaccacccacccggccctggtgctgctctggtgtcagatactgctgcttgtcaaccacaccgactaccgctggtgggcagaagtgcagcagaccccgaaaagacacagtctgtccagcacaaagttacttagtccccagatgtctggagaagaggaggattctgacttggcagccaaacttggaatgtgcaatagagaaatagtacgaagaggggctctcattctcttctgtgattatgtctgtcagaacctccatgactccgagcacttaacgtggctcattgtaaatcacattcaagatctgatcagcctttcccacgagcctccagtacaggacttcatcagtgccgttcatcggaactctgctgccagcggcctgttcatccaggcaattcagtctcgttgtgaaaacctttcaactccaaccatgctgaagaaaactcttcagtgcttggaggggatccatctcagccagtcgggagctgtgctcacgctgtatgtggacaggcttctgtgcacccctttccgtgtgctggctcgcatggtcgacatccttgcttgtcgccgggtagaaatgcttctggctgcaaatttacagagcagcatggcccagttgccaatggaagaactcaacagaatccaggaataccttcagagcagcgggctcgctcagagacaccaaaggctctattccctgctggacaggtttcgtctctccaccatgcaagactcacttagtccctctcctccagtctcttcccacccgctggacggggatgggcacgtgtcactggaaacagtgagtccggacaaagactggtacgttcatcttgtcaaatcccagtgttggaccaggtcagattctgcactgctggaaggtgcagagctggtgaatcggattcctgctgaagatatgaatgccttcatgatgaactcggagttcaacctaagcctgctagctccatgcttaagcctagggatgagtgaaatttctggtggccagaagagtgccctttttgaagcagcccgtgaggtgactctggcccgtgtgagcggcaccgtgcagcagctccctgctgtccatcatgtcttccagcccgagctgcctgcagagccggcggcctactggagcaagttgaatgatctgtttggggatgctgcactgtatcagtccctgcccactctggcccgggccctggcacagtacctggtggtggtctccaaactgcccagtcatttgcaccttcctcctgagaaagagaaggacattgtgaaattcgtggtggcaacccttgaggccctgtcctggcatttgatccatgagcagatcccgctgagtctggatctccaggcagggctggactgctgctgcctggccctgcagctgcctggcctctggagcgtggtctcctccacagagtttgtgacccacgcctgctccctcatctactgtgtgcacttcatcctggaggccgttgcagtgcagcctggagagcagcttcttagtccagaaagaaggacaaataccccaaaagccatcagcgaggaggaggaggaagtagatccaaacacacagaatcctaagtatatcactgcagcctgtgagatggtggcagaaatggtggagtctctgcagtcggtgttggccttgggtcataaaaggaatagcggcgtgccggcgtttctcacgccattgctaaggaacatcatcatcagcctggcccgcctgccccttgtcaacagctacacacgtgtgcccccactggtgtggaagcttggatggtcacccaaaccgggaggggattttggcacagcattccctgagatccccgtggagttcctccaggaaaaggaagtctttaaggagttcatctaccgcatcaacacactaggctggaccagtcgtactcagtttgaagaaacttgggccaccctccttggtgtcctggtgacgcagcccctcgtgatggagcaggaggagagcccaccagaagaagacacagagaggacccagatcaacgtcctggccgtgcaggccatcacctcactggtgctcagtgcaatgactgtgcctgtggccggcaacccagctgtaagctgcttggagcagcagccccggaacaagcctctgaaagctctcgacaccaggtttgggaggaagctgagcattatcagagggattgtggagcaagagattcaagcaatggtttcaaagagagagaatattgccacccatcatttatatcaggcatgggatcctgtcccttctctgtctccggctactacaggtgccctcatcagccacgagaagctgctgctacagatcaaccccgagcgggagctggggagcatgagctacaaactcggccaggtgtccatacactccgtgtggctggggaacagcatcacacccctgagggaggaggaatgggacgaggaagaggaggaggaggccgacgcccctgcaccttcgtcaccacccacgtctccagtcaactccaggaaacaccgggctggagttgacatccactcctgttcgcagtttttgcttgagttgtacagccgctggatcctgccgtccagctcagccaggaggaccccggccatcctgatcagtgaggtggtcagatcccttctagtggtctcagacttgttcaccgagcgcaaccagtttgagctgatgtatgtgacgctgacagaactgcgaagggtgcacccttcagaagacgagatcctcgctcagtacctggtgcctgccacctgcaaggcagctgccgtccttgggatggacaaggccgtggcggagcctgtcagccgcctgctggagagcacgctcaggagcagccacctgcccagcagggttggagccctgcacggcgtcctctatgtgctggagtgcgacctgctggacgacactgccaagcagctcatcccggtcatcagcgactatctcctctccaacctgaaagggatcgcccactgcgtgaacattcacagccagcagcacgtactggtcatgtgtgccactgcgttttacctcattgagaactatcctctggacgtagggccggaattttcagcatcaataatacagatgtgtggggtgatgctgtctggaagtgaggagtccaccccctccatcatttaccactgtgccctcagaggcctggagcgcctcctgctctctgagcagctctcccgcctggatgcagaatcgctggtcaagctgagtgtggacagagtgaacgtgcacagcccgcaccgggccatggcggctctgggcctgatgctcacctgcatgtacacaggaaaggagaaagtcagtccgggtagaacttcagaccctaatcctgcagcccccgacagcgagtcagtgattgttgctatggagcgggtatctgttctttttgataggatcaggaaaggctttccttgtgaagccagagtggtggccaggatcctgccccagtttctagacgacttcttcccaccccaggacatcatgaacaaagtcatcggagagtttctgtccaaccagcagccatacccccagttcatggccaccgtggtgtataaggtgtttcagactctgcacagcaccgggcagtcgtccatggtccgggactgggtcatgctgtccctctccaacttcacgcagagggccccggtcgccatggccacgtggagcctctcctgcttctttgtcagcgcgtccaccagcccgtgggtcgcggcgatcctcccacatgtcatcagcaggatgggcaagctggagcaggtggacgtgaaccttttctgcctggtcgccacagacttctacagacaccagatagaggaggagctcgaccgcagggccttccagtctgtgcttgaggtggttgcagccccaggaagcccatatcaccggctgctgacttgtttacgaaatgtccacaaggtcaccacctgctgagcgccatggtgggagagactgtgaggcggcagctggggccggagcctttggaagtctgcgcccttgtgccctgcctccaccgagccagcttggtccctatgggcttccgcacatgccgcgggcggccaggcaacgtgcgtgtctctgccatgtggcagaagtgctctttgtggcagtggccaggcagggagtgtctgcagtcctggtggggctgagcctgaggccttccagaaagcaggagcagctgtgctgcaccccatgtgggtgaccaggtcctttctcctgatagtcacctgctggttgttgccaggttgcagctgctcttgcatctgggccagaagtcctccctcctgcaggctggctgttggcccctctgctgtcctgcagtagaaggtgccgtgagcaggctttgggaacactggcctgggtctccctggtggggtgtgcatgccacgccccgtgtctggatgcacagatgccatggcctgtgctgggccagtggctgggggtgctagacacccggcaccattctcccttctctcttttcttctcaggatttaaaatttaattatatcagtaaagagattaattttaacgtaactctttctatgcccgtgtaaagtatgtgaatcgcaaggcctgtgctgcatgcgacagcgtccggggtggtggacagggcccccggccacgctccctctcctgtagccactggcatagccctcctgagcacccgctgacatttccgttgtacatgttcctgtttatgcattcacaaggtgactgggatgtagagaggcgttagtgggcaggtggccacagcaggactgaggacaggcccccattatcctaggggtgcgctcacctgcagcccctcctcctcgggcacagacgactgtcgttctccacccaccagtcagggacagcagcctccctgtcactcagctgagaaggccagccctccctggctgtgagcagcctccactgtgtccagagacatgggcctcccactcctgttccttgctagccctggggtggcgtctgcctaggagctggctggcaggtgttgggacctgctgctccatggatgcatgccctaagagtgtcactgagctgtgttttgtctgagcctctctcggtcaacagcaaagcttggtgtcttggcactgttagtgacagagcccagcatcccttctgcccccgttccagctgacatcttgcacggtgaccccttttagtcaggagagtgcagatctgtgctcatcggagactgccccacggccctgtcagagccgccactcctatccccaggccaggtccctggaccagcctcctgtttgcaggcccagaggagccaagtcattaaaatggaagtggattctggatggccgggctgctgctgatgtaggagctggatttgggagctctgcttgccgactggctgtgagacgaggcaggggctctgcttcctcagccctagaggcgagccaggcaaggttggcgactgtcatgtggcttggtttggtcatgcccgtcgatgttttgggtattgaatgtggtaagtggaggaaatgttggaactctgtgcaggtgctgccttgagacccccaagcttccacctgtccctctcctatgtggcagctggggagcagctgagatgtggacttgtatgctgcccacatacgtgagggggagctgaaagggagcccctcctctgagcagcctctgccaggcctgtatgaggcttttcccaccagctcccaacagaggcctcccccagccaggaccacctcgtcctcgtggcggggcagcaggagcggtagaaaggggtccgatgtttgaggaggcccttaagggaagctactgaattataacacgtaagaaaatcaccattccgtattggttgggggctcctgtttctcatcctagctttttcctggaaagcccgctagaaggtttgggaacgaggggaaagttctcagaactgttggctgctccccacccgcctcccgcctcccccgcaggttatgtcagcagctctgagacagcagtatcacaggccagatgttgttcctggctagatgtttacatttgtaagaaataacactgtgaatgtaaaacagagccattcccttggaatgcatatcgctgggctcaacatagagtttgtcttcctcttgtttacgacgtgatctaaaccagtccttagcaaggggctcagaacaccccgctctggcagtaggtgtcccccacccccaaagacctgcctgtgtgctccggagatgaatatgagctcattagtaaaaatgacttcacccacgcatatacataaagtatccatgcatgtgcatatagacacatctataattttacacacacacctctcaagacggagatgcatggcctctaagagtgcccgtgtcggttcttcctggaagttgactttccttagacccgccaggtcaagttagccgcgtgacggacatccaggcgtgggacgtggtcagggcagggctcattcattgcccactaggatcccactggcgaagatggtctccatatcagctctctgcagaagggaggaagactttatcatgttcctaaaaatctgtggcaagcacccatcgtattatccaaattttgttgcaaatgtgattaatttggttgtcaagttttgggggtgggctgtggggagattgcttttgttttcctgctggtaatatcgggaaagattttaatgaaaccagggtagaattgtttggcaatgcactgaagcgtgtttctttcccaaaatgtgcctcccttccgctgcgggcccagctgagtctatgtaggtgatgtttccagctgccaagtgctctttgttactgtccaccctcatttctgccagcgcatgtgtcctttcaaggggaaaatgtgaagctgaaccccctccagacacccagaatgtagcatctgagaaggccctgtgccctaaaggacacccctcgcccccatcttcatggagggggtcatttcagagccctcggagccaatgaacagctcctcctcttggagctgagatgagccccacgtggagctcgggacggatagtagacagcaataactcggtgtgtggccgcctggcaggtggaacttcctcccgttgcggggtggagtgaggttagttctgtgtgtctggtgggtggagtcaggcttctcttgctacctgtgagcatccttcccagcagacatcctcatcgggctttgtccctcccccgcttcctccctctgcggggaggacccgggaccacagctgctggccagggtagacttggagctgtcctccagaggggtcacgtgtaggagtgagaagaaggaagatcttgagagctgctgagggaccttggagagctcaggatggctcagacgaggacactcgcttgccgggcctgggcctcctgggaaggagggagctgctcagaatgccgcatgacaactgaaggcaacctggaaggttcaggggccgctcttcccccatgtgcctgtcacgctctggtgcagtcaaaggaacgccttcccctcagttgtttctaagagcagagtctcccgctgcaatctgggtggtaactgccagccttggaggatcgtggccaacgtggacctgcctacggagggtgggctctgacccaagtggggcctccttgtccaggtctcactgctttgcaccgtggtcagagggactgtcagctgagcttgagctcccctggagccagcagggctgtgatgggcgagtcccggagccccacccagacctgaatgcttctgagagcaaagggaaggactgacgagagatgtatatttaattttttaactgctgcaaacattgtacatccaaattaaaggaaaaaaatggaaaccatcaaaaaaaaaaaaaaaaaa

SEQ ID NO: 2 - protein, 107 aa, synthetic construct [sequence omitted]

SEQ ID NO: 3 - protein, 214 aa, synthetic construct
DIQLTQSPSSLSASVGDRVTITCRASDKLYSNLAWYQQKPGKAPKLLIYDATLLASGVPSRFSGSGSGTDYTLTISSLQPEDFATYYCQHFWGTPLTFGQGTKVEIKRTVAAPSVFIFPPSDEQLKSGTASVVCLLNNFYPREAKVQWKVDNALQSGNSQESVTEQDSKDSTYSLSSTLTLSKADYEKHKVYACEVTHQGLSSPVTKSFNRGEC

SEQ ID NO: 4 - protein, 107 aa, synthetic construct
ASTKGPSVFPLAPSSKSTSGGTAALGCLVKDYFPEPVTVSWNSGALTSGVHTFPAVLQSSGLYSLSSVVTVPSSSLGTQTYICNVNHKPSNTKVDKRVEPKSCDKTH

SEQ ID NO: 5 - protein, 223 aa, synthetic construct
EVQLVESGGGLVQPGGSLRLSCATSGFTFTSYWMHWVRQAPGKGLEWVAEINPTNGRTNYIEKFKSRITLSVDKSKSTVYLQMNSLRAEDTAVYYCARGTRAYHYWGQGTLVTVSSASTKGPSVFPLAPSSKSTSGGTAALGCLVKDYFPEPVTVSWNSGALTSGVHTFPAVLQSSGLYSLSSVVTVPSSSLGTQTYICNVNHKPSNTKVDKRVEPKSCDKTH

SEQ ID NO: 6 - protein, 11 aa, synthetic construct
RASDGLYSNLA

SEQ ID NO: 7 - protein, 11 aa, synthetic construct
RASDNLYRNLA

SEQ ID NO: 8 - protein, 11 aa, synthetic construct
RASDKLYSNLA

SEQ ID NO: 9 - protein, 7 aa, synthetic construct
DATLLAS

SEQ ID NO: 10 - protein, 7 aa, synthetic construct
DARNLAS

SEQ ID NO: 11 - protein, 7 aa, synthetic construct
DAFNLAS

SEQ ID NO: 12 - protein, 7 aa, synthetic construct
DATRLAS

SEQ ID NO: 13 - protein, 7 aa, synthetic construct
DATKLAS

SEQ ID NO: 14 - protein, 7 aa, synthetic construct
DAKNLAS

SEQ ID NO: 15 - protein, 9 aa, synthetic construct
QHFWGTPLT

SEQ ID NO: 16 - protein, 10 aa, synthetic construct
GYTFNSYWMH

SEQ ID NO: 17 - protein, 10 aa, synthetic construct
GYTFKSYWMH

SEQ ID NO: 18 - protein, 10 aa, synthetic construct
GFTFTSYWMH

SEQ ID NO: 19 - protein, 10 aa, synthetic construct
GYTFTSYWVH

SEQ ID NO: 20 - protein, 10 aa, synthetic construct
GYTFTSYWMH

SEQ ID NO: 21 - protein, 17 aa, synthetic construct
EINPTNGRVNYIEKFKS

SEQ ID NO: 22 - protein, 17 aa, synthetic construct
EINPTNGRFNYIEKFKS

SEQ ID NO: 23 - protein, 17 aa, synthetic construct
EINPTNGRTNYIEKFKS

SEQ ID NO: 24 - protein, 17 aa, synthetic construct
EINPTNGRSNYIEKFKS

SEQ ID NO: 25 - protein, 7 aa, synthetic construct
GTRAYHY

SEQ ID NO: 26 - protein, 107 aa, synthetic construct
DIQMTQSPSSLSASVGDRVTITCRASDNLYSNLAWYQQKPGKSPKLLVYDATNLADGVPSRFSGSGSGTDYTLTISSLQPEDFATYYCQHFWGTPLTFGQGTKVEIK

SEQ ID NO: 27 - protein, 107 aa, synthetic construct
DIQLTQSPSSLSASVGDRVTITCRASDGLYSNLAWYQQKPGKAPKLLIYDATKLASGVPSRFSGSGSGTDYTLTISSLQPEDFATYYCQHFWGTPLTFGQGTKVEIK

SEQ ID NO: 28 - protein, 107 aa, synthetic construct
DIQLTQSPSSLSASVGDRVTITCRASDGLYSNLAWYQQKPGKAPKLLIYDAFNLASGVPSRFSGSGSGTDYTLTISSLQPEDFATYYCQHFWGTPLTFGQGTKVEIK

SEQ ID NO: 29 - protein, 107 aa, synthetic construct
DIQLTQSPSSLSASVGDRVTITCRASDGLYSNLAWYQQKPGKAPKLLIYDATRLASGVPSRFSGSGSGTDYTLTISSLQPEDFATYYCQHFWGTPLTFGQGTKVEIK

SEQ ID NO: 30 - protein, 107 aa, synthetic construct
DIQLTQSPSSLSASVGDRVTITCRASDGLYSNLAWYQQKPGKAPKLLIYDAKNLASGVPSRFSGSGSGTDYTLTISSLQPEDFATYYCQHFWGTPLTFGQGTKVEIK

SEQ ID NO: 31 - protein, 107 aa, synthetic construct
DIQLTQSPSSLSASVGDRVTITCRASDNLYRNLAWYQQKPGKAPKLLIYDATKLASGVPSRFSGSGSGTDYTLTISSLQPEDFATYYCQHFWGTPLTFGQGTKVEIK

SEQ ID NO: 32 - protein, 107 aa, synthetic construct
DIQLTQSPSSLSASVGDRVTITCRASDKLYSNLAWYQQKPGKAPKLLIYDATLLASGVPSRFSGSGSGTDYTLTISSLQPEDFATYYCQHFWGTPLTFGQGTKVEIK

SEQ ID NO: 33 - protein, 107 aa, synthetic construct
DIQLTQSPSSLSASVGDRVTITCRASDGLYSNLAWYQQKPGKAPKLLIYDARNLASGVPSRFSGSGSGTDYTLTISSLQPEDFATYYCQHFWGTPLTFGQGTKVEIK

SEQ ID NO: 34 - protein, 107 aa, synthetic construct
DIQLTQSPSSLSASVGDRVTITCRASDNLYRNLAWYQQKPGKAPKLLIYDARNLASGVPSRFSGSGSGTDYTLTISSLQPEDFATYYCQHFWGTPLTFGQGTKVEIK

SEQ ID NO: 35 - protein, 116 aa, synthetic construct
EVQLVQSGAEVKKPGASVKVSCKASGYTFTSYWMHWVRQAPGQRLEWIGEINPTNGRTNYIEKFKSRATLTVDKSASTAYMELSSLRSEDTAVYYCARGTRAYHYWGQGTMVTVSS

SEQ ID NO: 36 - protein, 116 aa, synthetic construct
EVQLVESGGGLVQPGGSLRLSCATSGYTFTSYWVHWVRQAPGKGLEWVAEINPTNGRTNYIEKFKSRITLSVDKSKSTVYLQMNSLRAEDTAVYYCARGTRAYHYWGQGTLVTVSS

SEQ ID NO: 37 - protein, 116 aa, synthetic construct
EVQLVESGGGLVQPGGSLRLSCATSGYTFTSYWMHWVRQAPGKGLEWVAEINPTNGRVNYIEKFKSRITLSVDKSKSTVYLQMNSLRAEDTAVYYCARGTRAYHYWGQGTLVTVSS

SEQ ID NO: 38 - protein, 116 aa, synthetic construct
EVQLVESGGGLVQPGGSLRLSCATSGYTFTSYWVHWVRQAPGKGLEWVAEINPTNGRSNYIEKFKSRITLSVDKSKSTVYLQMNSLRAEDTAVYYCARGTRAYHYWGQGTLVTVSS

SEQ ID NO: 39 - protein, 116 aa, synthetic construct
EVQLVESGGGLVQPGGSLRLSCATSGYTFTSYWVHWVRQAPGKGLEWVAEINPTNGRVNYIEKFKSRITLSVDKSKSTVYLQMNSLRAEDTAVYYCARGTRAYHYWGQGTLVTVSS

SEQ ID NO: 40 - protein, 116 aa, synthetic construct
EVQLVESGGGLVQPGGSLRLSCATSGFTFTSYWMHWVRQAPGKGLEWVAEINPTNGRTNYIEKFKSRITLSVDKSKSTVYLQMNSLRAEDTAVYYCARGTRAYHYWGQGTLVTVSS

SEQ ID NO: 41 - protein, 116 aa, synthetic construct
EVQLVESGGGLVQPGGSLRLSCATSGYTFNSYWMHWVRQAPGKGLEWVAEINPTNGRTNYIEKFKSRITLSVDKSKSTVYLQMNSLRAEDTAVYYCARGTRAYHYWGQGTLVTVSS

SEQ ID NO: 42 - protein, 116 aa, synthetic construct
EVQLVESGGGLVQPGGSLRLSCATSGYTFNSYWMHWVRQAPGKGLEWVAEINPTNGRFNYIEKFKSRITLSVDKSKSTVYLQMNSLRAEDTAVYYCARGTRAYHYWGQGTLVTVSS

SEQ ID NO: 43 - protein, 116 aa, synthetic construct
EVQLVESGGGLVQPGGSLRLSCATSGYTFKSYWMHWVRQAPGKGLEWVAEINPTNGRTNYIEKFKSRITLSVDKSKSTVYLQMNSLRAEDTAVYYCARGTRAYHYWGQGTLVTVSS

SEQ ID NO: 44 - protein, 214 aa, synthetic construct
DIQMTQSPASLSASLEEIVTITCQASQDIGNWLAWYQQKPGKSPQLLIYGATSLADGVPSRFSGSRSGTQFSLKISRVQVEDIGIYYCLQAYNTPWTFGGGTKLELKRADAAPTVSIFPPSTEQLATGGASVVCLMNNFYPRDISVKWKIDGTERRDGVLDSVTDQDSKDSTYSMSSTLSLTKADYESHNLYTCEVVHKTSSSPVVKSFNRNEC

SEQ ID NO: 45 - protein, 220 aa, synthetic construct
EVQLVESGGGLVQPGNSLTLSCVASGFTFSNYGMHWIRQAPKKGLEWIAMIYYDSSKMNYADTVKGRFTISRDNSKNTLYLEMNSLRSEDTAMYYCAVPTSHYVVDVWGQGVSVTVSSAETTAPSVYPLAPGTALKSNSMVTLGCLVKGYFPEPVTVTWNSGALSSGVHTFPAVLQSGLYTLTSSVTVPSSTWSSQAVTCNVAHPASSTKVDKKIVPREC

SEQ ID NO: 46 - RNA, 19 nt, synthetic construct
  source 1..19: mol_type = other RNA
ctcaggttctgcttttacc

SEQ ID NO: 47 - RNA, 19 nt, synthetic construct
  source 1..19: mol_type = other RNA
gaccctggaaaagctgatg

SEQ ID NO: 48 - RNA, 19 nt, synthetic construct
  source 1..19: mol_type = other RNA
accctggaaaagctgatga

SEQ ID NO: 49 - RNA, 19 nt, synthetic construct
  source 1..19: mol_type = other RNA
ccctggaaaagctgatgaa

SEQ ID NO: 50 - RNA, 19 nt, synthetic construct
  source 1..19: mol_type = other RNA
gaaaagctgatgaaggcct

SEQ ID NO: 51 - RNA, 19 nt, synthetic construct
  source 1..19: mol_type = other RNA
tgatgaaggccttcgagtc

SEQ ID NO: 52 - RNA, 19 nt, synthetic construct
  source 1..19: mol_type = other RNA
gatgaaggccttcgagtcc

SEQ ID NO: 53 - RNA, 19 nt, synthetic construct
  source 1..19: mol_type = other RNA
ccttcgagtccctcaagtc

SEQ ID NO: 54 - RNA, 19 nt, synthetic construct
  source 1..19: mol_type = other RNA
cttcgagtccctcaagtcc

SEQ ID NO: 55 - RNA, 19 nt, synthetic construct
  source 1..19: mol_type = other RNA
ctgcaccgaccaaagaaag

SEQ ID NO: 56 - RNA, 19 nt, synthetic construct
  source 1..19: mol_type = other RNA
tgcaccgaccaaagaaaga

SEQ ID NO: 57 - DNA, 19 bp, synthetic construct
  source 1..19: mol_type = other DNA
gcaccgaccaaagaaagaa

SEQ ID NO: 58 - RNA, 19 nt, synthetic construct
  source 1..19: mol_type = other RNA
tcgctatggaactttttct

SEQ ID NO: 59 - RNA, 19 nt, synthetic construct
  source 1..19: mol_type = other RNA
tttgatggattctaatctt

SEQ ID NO: 60 - RNA, 19 nt, synthetic construct
  source 1..19: mol_type = other RNA
tggattctaatcttccaag

SEQ ID NO: 61 - RNA, 19 nt, synthetic construct
  source 1..19: mol_type = other RNA
gcaattttgcaaatgacaa

SEQ ID NO: 62 - RNA, 19 nt, synthetic construct
  source 1..19: mol_type = other RNA
gacgttacatcatacacag

SEQ ID NO: 63 - RNA, 19 nt, synthetic construct
  source 1..19: mol_type = other RNA
accaagaccacaatgttgt

SEQ ID NO: 64 - RNA, 19 nt, synthetic construct
  source 1..19: mol_type = other RNA
gtattgtggaacttatagc

SEQ ID NO: 65 - RNA, 19 nt, synthetic construct
  source 1..19: mol_type = other RNA
tgaactacatcgatcatgg

SEQ ID NO: 66 - RNA, 19 nt, synthetic construct
  source 1..19: mol_type = other RNA
gatgctgtgaagctttgtg

SEQ ID NO: 67 - RNA, 19 nt, synthetic construct
  source 1..19: mol_type = other RNA
ggtcctgttacaacaagta

SEQ ID NO: 68 - RNA, 19 nt, synthetic construct
  source 1..19: mol_type = other RNA
acaagtaaatcctcatcac

SEQ ID NO: 69 - RNA, 19 nt, synthetic construct
  source 1..19: mol_type = other RNA
aatgatggcaactgtttgt

SEQ ID NO: 70 - RNA, 19 nt, synthetic construct
  source 1..19: mol_type = other RNA
ggtgtttattggctttgta

SEQ ID NO: 71 - RNA, 19 nt, synthetic construct
  source 1..19: mol_type = other RNA
acagatcattggaattcct

SEQ ID NO: 72 - RNA, 19 nt, synthetic construct
  source 1..19: mol_type = other RNA
gcgactgtctcgacagata

SEQ ID NO: 73 - RNA, 19 nt, synthetic construct
  source 1..19: mol_type = other RNA
cgtgagcactgttcaactg

SEQ ID NO: 74 - RNA, 19 nt, synthetic construct
  source 1..19: mol_type = other RNA
agcacaaagttacttagtc

SEQ ID NO: 75 - RNA, 19 nt, synthetic construct
  source 1..19: mol_type = other RNA
agccaaacttggaatgtgc

SEQ ID NO: 76 - RNA, 19 nt, synthetic construct
  source 1..19: mol_type = other RNA
gcaatagagaaatagtacg

SEQ ID NO: 77 - RNA, 19 nt, synthetic construct
  source 1..19: mol_type = other RNA
tgattatgtctgtcagaac

SEQ ID NO: 78 - RNA, 19 nt, synthetic construct
  source 1..19: mol_type = other RNA
gtcagaacctccatgactc

SEQ ID NO: 79 - RNA, 19 nt, synthetic construct
  source 1..19: mol_type = other RNA
tcattgtaaatcacattca

SEQ ID NO: 80 - RNA, 19 nt, synthetic construct
  source 1..19: mol_type = other RNA
gtacaggacttcatcagtg

SEQ ID NO: 81 - RNA, 19 nt, synthetic construct
  source 1..19: mol_type = other RNA
gcaattcagtctcgttgtg

SEQ ID NO: 82 - RNA, 19 nt, synthetic construct
  source 1..19: mol_type = other RNA
tgccaatggaagaactcaa

SEQ ID NO: 83 - RNA, 19 nt, synthetic construct
  source 1..19: mol_type = other RNA
atgcaagactcacttagtc

SEQ ID NO: 84 - RNA, 19 nt, synthetic construct
  source 1..19: mol_type = other RNA
ggatgagtgaaatttctgg

SEQ ID NO: 85 - RNA, 19 nt, synthetic construct
  source 1..19: mol_type = other RNA
ggagcaagttgaatgatct

SEQ ID NO: 86 - RNA, 19 nt, synthetic construct
  source 1..19: mol_type = other RNA
ggtaaaagcagaacctgag

SEQ ID NO: 87 - RNA, 19 nt, synthetic construct
  source 1..19: mol_type = other RNA
tgtaaaagcagaacctgag

SEQ ID NO: 88 - RNA, 19 nt, synthetic construct
  source 1..19: mol_type = other RNA
agtaaaagcagaacctgag

SEQ ID NO: 89 - RNA, 19 nt, synthetic construct
  source 1..19: mol_type = other RNA
ngtaaaagcagaacctgag

SEQ ID NO: 90 - RNA, 19 nt, synthetic construct
  source 1..19: mol_type = other RNA
ngtaaaagcagaacctgan

SEQ ID NO: 91 - RNA, 19 nt, synthetic construct
  source 1..19: mol_type = other RNA
catcagcttttccagggtc

SEQ ID NO: 92 - RNA, 19 nt, synthetic construct
  source 1..19: mol_type = other RNA
tatcagcttttccagggtc

SEQ ID NO: 93 - RNA, 19 nt, synthetic construct
  source 1..19: mol_type = other RNA
aatcagcttttccagggtc

SEQ ID NO: 94 - RNA, 19 nt, synthetic construct
  source 1..19: mol_type = other RNA
natcagcttttccagggtc

SEQ ID NO: 95 - RNA, 19 nt, synthetic construct
  source 1..19: mol_type = other RNA
natcagcttttccagggtn

SEQ ID NO: 96 - RNA, 19 nt, synthetic construct
  source 1..19: mol_type = other RNA
tcatcagcttttccagggt

SEQ ID NO: 97 - RNA, 19 nt, synthetic construct
  source 1..19: mol_type = other RNA
acatcagcttttccagggt

SEQ ID NO: 98 - RNA, 19 nt, synthetic construct
  source 1..19: mol_type = other RNA
ncatcagcttttccagggt

SEQ ID NO: 99 - RNA, 19 nt, synthetic construct
  source 1..19: mol_type = other RNA
ncatcagcttttccagggn

SEQ ID NO: 100 - RNA, 19 nt, synthetic construct
  source 1..19: mol_type = other RNA
ttcatcagcttttccaggg

SEQ ID NO: 101 - RNA, 19 nt, synthetic construct
  source 1..19: mol_type = other RNA
atcatcagcttttccaggg

SEQ ID NO: 102 - RNA, 19 nt, synthetic construct
  source 1..19: mol_type = other RNA
ntcatcagcttttccaggg

SEQ ID NO: 103 - RNA, 19 nt, synthetic construct
  source 1..19: mol_type = other RNA
ntcatcagcttttccaggn

SEQ ID NO: 104 - RNA, 19 nt, synthetic construct
  source 1..19: mol_type = other RNA
aggccttcatcagcttttc

SEQ ID NO: 105 - RNA, 19 nt, synthetic construct
  source 1..19: mol_type = other RNA
tggccttcatcagcttttc

SEQ ID NO: 106 - RNA, 19 nt, synthetic construct
  source 1..19: mol_type = other RNA
nggccttcatcagcttttc

SEQ ID NO: 107 - RNA, 19 nt, synthetic construct
  source 1..19: mol_type = other RNA
nggccttcatcagcttttn

SEQ ID NO: 108 - RNA, 19 nt, synthetic construct
  source 1..19: mol_type = other RNA
gactcgaaggccttcatca

SEQ ID NO: 109 - RNA, 19 nt, synthetic construct
  source 1..19: mol_type = other RNA
tactcgaaggccttcatca

SEQ ID NO: 110 - RNA, 19 nt, synthetic construct
  source 1..19: mol_type = other RNA
aactcgaaggccttcatca

SEQ ID NO: 111 - RNA, 19 nt, synthetic construct
  source 1..19: mol_type = other RNA
nactcgaaggccttcatca

SEQ ID NO: 112 - RNA, 19 nt, synthetic construct
  source 1..19: mol_type = other RNA
nactcgaaggccttcatcn

SEQ ID NO: 113 - RNA, 19 nt, synthetic construct
  source 1..19: mol_type = other RNA
ggactcgaaagccttcatc

SEQ ID NO: 114 - RNA, 19 nt, synthetic construct
  source 1..19: mol_type = other RNA
tgactcgaaagccttcatc

SEQ ID NO: 115 - RNA, 19 nt, synthetic construct
  source 1..19: mol_type = other RNA
agactcgaaagccttcatc

SEQ ID NO: 116 - RNA, 19 nt, synthetic construct
  source 1..19: mol_type = other RNA
ngactcgaaagccttcatc

SEQ ID NO: 117 - RNA, 19 nt, synthetic construct
  source 1..19: mol_type = other RNA
ngactcgaaagccttcatn

SEQ ID NO: 118 - RNA, 19 nt, synthetic construct
  source 1..19: mol_type = other RNA
gacttgagggactcgaagg

SEQ ID NO: 119 - RNA, 19 nt, synthetic construct
  source 1..19: mol_type = other RNA
tacttgagggactcgaagg

SEQ ID NO: 120 - RNA, 19 nt, synthetic construct
  source 1..19: mol_type = other RNA
aacttgagggactcgaagg

SEQ ID NO: 121 - RNA, 19 nt, synthetic construct
  source 1..19: mol_type = other RNA
nacttgagggactcgaagg

SEQ ID NO: 122 - RNA, 19 nt, synthetic construct
  source 1..19: mol_type = other RNA
nacttgagggactcgaagn

SEQ ID NO: 123 - RNA, 19 nt, synthetic construct
  source 1..19: mol_type = other RNA
ggacttgagggactcgaag

SEQ ID NO: 124 - RNA, 19 nt, synthetic construct
  source 1..19: mol_type = other RNA
tgacttgagggactcgaag

SEQ ID NO: 125 - RNA, 19 nt, synthetic construct
  source 1..19: mol_type = other RNA
agacttgagggactcgaag

SEQ ID NO: 126 - RNA, 19 nt, synthetic construct
  source 1..19: mol_type = other RNA
ngacttgagggactcgaag

SEQ ID NO: 127 - RNA, 19 nt, synthetic construct
  source 1..19: mol_type = other RNA
ngacttgagggactcgaan

SEQ ID NO: 128 - RNA, 19 nt, synthetic construct
  source 1..19: mol_type = other RNA
ctttctttggtcggtgcag

SEQ ID NO: 129 - RNA, 19 nt, synthetic construct
  source 1..19: mol_type = other RNA
ttttctttggtcggtgcag

SEQ ID NO: 130 - RNA, 19 nt, synthetic construct
  source 1..19: mol_type = other RNA
atttctttggtcggtgcag

SEQ ID NO: 131 - RNA, 19 nt, synthetic construct
  source 1..19: mol_type = other RNA
ntttctttggtcggtgcag

SEQ ID NO: 132 - RNA, 19 nt, synthetic construct
  source 1..19: mol_type = other RNA
ntttctttggtcggtgcan

SEQ ID NO: 133 - RNA, 19 nt, synthetic construct
  source 1..19: mol_type = other RNA
tctttctttggtcggtgca

SEQ ID NO: 134 - RNA, 19 nt, synthetic construct
  source 1..19: mol_type = other RNA
actttctttggtcggtgca

SEQ ID NO: 135 - RNA, 19 nt, synthetic construct
  source 1..19: mol_type = other RNA
nctttctttggtcggtgca

SEQ ID NO: 136 - RNA, 19 nt, synthetic construct
  source 1..19: mol_type = other RNA
nctttctttggtcggtgcn

SEQ ID NO: 137 - RNA, 19 nt, synthetic construct
  source 1..19: mol_type = other RNA
ttctttctttggtcggtgc

SEQ ID NO: 138 - RNA, 19 nt, synthetic construct
  source 1..19: mol_type = other RNA
atctttctttggtcggtgc

SEQ ID NO: 139 - RNA, 19 nt, synthetic construct
  source 1..19: mol_type = other RNA
ntctttctttggtcggtgc

SEQ ID NO: 140 - RNA, 19 nt, synthetic construct
  source 1..19: mol_type = other RNA
ntctttctttggtcggtgn

SEQ ID NO: 141 - RNA, 19 nt, synthetic construct
  source 1..19: mol_type = other RNA
agaaaaagttccatagcga

SEQ ID NO: 142 - RNA, 19 nt, synthetic construct
  source 1..19: mol_type = other RNA
tgaaaaagttccatagcga

SEQ ID NO: 143 - RNA, 19 nt, synthetic construct
  source 1..19: mol_type = other RNA
ngaaaaagttccatagcga

SEQ ID NO: 144 - RNA, 19 nt, synthetic construct
  source 1..19: mol_type = other RNA
ngaaaaagttccatagcgn

SEQ ID NO: 145 - RNA, 19 nt, synthetic construct
  source 1..19: mol_type = other RNA
aagattagaatccatcaaa

SEQ ID NO: 146 - RNA, 19 nt, synthetic construct
  source 1..19: mol_type = other RNA
tagattagaatccatcaaa

SEQ ID NO: 147 - RNA, 19 nt, synthetic construct
  source 1..19: mol_type = other RNA
nagattagaatccatcaaa

SEQ ID NO: 148 - RNA, 19 nt, synthetic construct
  source 1..19: mol_type = other RNA
nagattagaatccatcaan

SEQ ID NO: 149 - RNA, 19 nt, synthetic construct
  source 1..19: mol_type = other RNA
cttggaagattagaatcca

SEQ ID NO: 150 - RNA, 19 nt, synthetic construct
  source 1..19: mol_type = other RNA
tttggaagattagaatcca

SEQ ID NO: 151 - RNA, 19 nt, synthetic construct
  source 1..19: mol_type = other RNA
attggaagattagaatcca

SEQ ID NO: 152 - RNA, 19 nt, synthetic construct
  source 1..19: mol_type = other RNA
nttggaagattagaatcca

SEQ ID NO: 153 - RNA, 19 nt, synthetic construct
  source 1..19: mol_type = other RNA
nttggaagattagaatccn

SEQ ID NO: 154 - RNA, 19 nt, synthetic construct
  source 1..19: mol_type = other RNA
ttgtcatttgcaaaattgc

SEQ ID NO: 155 - RNA, 19 nt, synthetic construct
  source 1..19: mol_type = other RNA
atgtcatttgcaaaattgc

SEQ ID NO: 156 - RNA, 19 nt, synthetic construct
  source 1..19: mol_type = other RNA
ntgtcatttgcaaaattgc

SEQ ID NO: 157 - RNA, 19 nt, synthetic construct
  source 1..19: mol_type = other RNA
ntgtcatttgcaaaattgn

SEQ ID NO: 158 - RNA, 19 nt, synthetic construct
  source 1..19: mol_type = other RNA
ctgtgtatgatgtaacgtc

SEQ ID NO: 159 - RNA, 19 nt, synthetic construct
  source 1..19: mol_type = other RNA
ttgtgtatgatgtaacgtc

SEQ ID NO: 160 - RNA, 19 nt, synthetic construct
  source 1..19: mol_type = other RNA
atgtgtatgatgtaacgtc

SEQ ID NO: 161 - RNA, 19 nt, synthetic construct
  source 1..19: mol_type = other RNA
ntgtgtatgatgtaacgtc

SEQ ID NO: 162 - RNA, 19 nt, synthetic construct
  source 1..19: mol_type = other RNA
ntgtgtatgatgtaacgtn

SEQ ID NO: 163 - RNA, 19 nt, synthetic construct
  source 1..19: mol_type = other RNA
acaacattgtggtcttggt

SEQ ID NO: 164 - RNA, 19 nt, synthetic construct
  source 1..19: mol_type = other RNA
tcaacattgtggtcttggt

SEQ ID NO: 165 - RNA, 19 nt, synthetic construct
  source 1..19: mol_type = other RNA
ncaacattgtggtcttggt

SEQ ID NO: 166 - RNA, 19 nt, synthetic construct
  source 1..19: mol_type = other RNA
ncaacattgtggtcttggn

SEQ ID NO: 167 - RNA, 19 nt, synthetic construct
  source 1..19: mol_type = other RNA
gctataagttccacaatac

SEQ ID NO: 168 - RNA, 19 nt, synthetic construct
  source 1..19: mol_type = other RNA
tctataagttccacaatac

SEQ ID NO: 169 - RNA, 19 nt, synthetic construct
  source 1..19: mol_type = other RNA
actataagttccacaatac

SEQ ID NO: 170 - RNA, 19 nt, synthetic construct
  source 1..19: mol_type = other RNA
nctataagttccacaatac

SEQ ID NO: 171 - RNA, 19 nt, synthetic construct
  source 1..19: mol_type = other RNA
nctataagttccacaatan

SEQ ID NO: 172 - RNA, 19 nt, synthetic construct
  source 1..19: mol_type = other RNA
ccatgatcgatgtagttca

SEQ ID NO: 173 - RNA, 19 nt, synthetic construct
  source 1..19: mol_type = other RNA
tcatgatcgatgtagttca

SEQ ID NO: 174 - RNA, 19 nt, synthetic construct
  source 1..19: mol_type = other RNA
acatgatcgatgtagttca

SEQ ID NO: 175 - RNA, 19 nt, synthetic construct
  source 1..19: mol_type = other RNA
ncatgatcgatgtagttca

SEQ ID NO: 176 - RNA, 19 nt, synthetic construct
  source 1..19: mol_type = other RNA
ncatgatcgatgtagttcn

SEQ ID NO: 177 - RNA, 19 nt, synthetic construct
  source 1..19: mol_type = other RNA
cacaaagcttcacagcatc

SEQ ID NO: 178 - RNA, 19 nt, synthetic construct
  source 1..19: mol_type = other RNA
tacaaagcttcacagcatc

SEQ ID NO: 179 - RNA, 19 nt, synthetic construct
  source 1..19: mol_type = other RNA
aacaaagcttcacagcatc

SEQ ID NO: 180 - RNA, 19 nt, synthetic construct
  source 1..19: mol_type = other RNA
nacaaagcttcacagcatc

SEQ ID NO: 181 - RNA, 19 nt, synthetic construct
  source 1..19: mol_type = other RNA
nacaaagcttcacagcatn

SEQ ID NO: 182 - RNA, 19 nt, synthetic construct
  source 1..19: mol_type = other RNA
tacttgttgtaacaggacc

SEQ ID NO: 183 - RNA, 19 nt, synthetic construct
  source 1..19: mol_type = other RNA
aacttgttgtaacaggacc

SEQ ID NO: 184 - RNA, 19 nt, synthetic construct
  source 1..19: mol_type = other RNA
nacttgttgtaacaggacc

SEQ ID NO: 185 - RNA, 19 nt, synthetic construct
  source 1..19: mol_type = other RNA
nacttgttgtaacaggacn

SEQ ID NO: 186 - RNA, 19 nt, synthetic construct
  source 1..19: mol_type = other RNA
gtgatgaggatttacttgt

SEQ ID NO: 187 - RNA, 19 nt, synthetic construct
  source 1..19: mol_type = other RNA
ttgatgaggatttacttgt

SEQ ID NO: 188 - RNA, 19 nt, synthetic construct
  source 1..19: mol_type = other RNA
atgatgaggatttacttgt

SEQ ID NO: 189 - RNA, 19 nt, synthetic construct
  source 1..19: mol_type = other RNA
ntgatgaggatttacttgt

SEQ ID NO: 190 - RNA, 19 nt, synthetic construct
  source 1..19: mol_type = other RNA
ntgatgaggatttacttgn

SEQ ID NO: 191 - RNA, 19 nt, synthetic construct
  source 1..19: mol_type = other RNA
acaaacagttgccatcatt

SEQ ID NO: 192 - RNA, 19 nt, synthetic construct
  source 1..19: mol_type = other RNA
tcaaacagttgccatcatt

SEQ ID NO: 193 - RNA, 19 nt, synthetic construct
  source 1..19: mol_type = other RNA
ncaaacagttgccatcatt

SEQ ID NO: 194 - RNA, 19 nt, synthetic construct
  source 1..19: mol_type = other RNA
ncaaacagttgccatcatn

SEQ ID NO: 195 - RNA, 19 nt, synthetic construct
  source 1..19: mol_type = other RNA
tacaaagccaataaacacc

SEQ ID NO: 196 - RNA, 19 nt, synthetic construct
  source 1..19: mol_type = other RNA
aacaaagccaataaacacc

SEQ ID NO: 197 - RNA, 19 nt, synthetic construct
  source 1..19: mol_type = other RNA
nacaaagccaataaacacc

SEQ ID NO: 198 - RNA, 19 nt, synthetic construct
  source 1..19: mol_type = other RNA
nacaaagccaataaacacn

SEQ ID NO: 199 - RNA, 19 nt, synthetic construct
  source 1..19: mol_type = other RNA
aggaattccaatgatctgt

SEQ ID NO: 200 - RNA, 19 nt, synthetic construct
  source 1..19: mol_type = other RNA
tggaattccaatgatctgt

SEQ ID NO: 201 - RNA, 19 nt, synthetic construct
  source 1..19: mol_type = other RNA
nggaattccaatgatctgt

SEQ ID NO: 202 - RNA, 19 nt, synthetic construct
  source 1..19: mol_type = other RNA
nggaattccaatgatctgn

SEQ ID NO: 203 - RNA, 19 nt, synthetic construct
  source 1..19: mol_type = other RNA
tatctgtcgagacagtcgc

SEQ ID NO: 204 - RNA, 19 nt, synthetic construct
  source 1..19: mol_type = other RNA
aatctgtcgagacagtcgc

SEQ ID NO: 205 - RNA, 19 nt, synthetic construct
  source 1..19: mol_type = other RNA
natctgtcgagacagtcgc

SEQ ID NO: 206 - RNA, 19 nt, synthetic construct
  source 1..19: mol_type = other RNA
natctgtcgagacagtcgn

SEQ ID NO: 207 - RNA, 19 nt, synthetic construct
  source 1..19: mol_type = other RNA
cagttgaacagtgctcacg

SEQ ID NO: 208 - RNA, 19 nt, synthetic construct
  source 1..19: mol_type = other RNA
tagttgaacagtgctcacg

SEQ ID NO: 209 - RNA, 19 nt, synthetic construct
  source 1..19: mol_type = other RNA
aagttgaacagtgctcacg

SEQ ID NO: 210 - RNA, 19 nt, synthetic construct
  source 1..19: mol_type = other RNA
nagttgaacagtgctcacg

SEQ ID NO: 211 - RNA, 19 nt, synthetic construct
  source 1..19: mol_type = other RNA
nagttgaacagtgctcacn

SEQ ID NO: 212 - RNA, 19 nt, synthetic construct
  source 1..19: mol_type = other RNA
gactaagtaactttgtgct

SEQ ID NO: 213 - RNA, 19 nt, synthetic construct
  source 1..19: mol_type = other RNA
tactaagtaactttgtgct

SEQ ID NO: 214 - RNA, 19 nt, synthetic construct
  source 1..19: mol_type = other RNA
aactaagtaactttgtgct

SEQ ID NO: 215 - RNA, 19 nt, synthetic construct
  source 1..19: mol_type = other RNA
nactaagtaactttgtgct

SEQ ID NO: 216 - RNA, 19 nt, synthetic construct
  source 1..19: mol_type = other RNA
nactaagtaactttgtgcn

SEQ ID NO: 217 - RNA, 19 nt, synthetic construct
  source 1..19: mol_type = other RNA
gcacattccaagtttggct

SEQ ID NO: 218 - RNA, 19 nt, synthetic construct
  source 1..19: mol_type = other RNA
tcacattccaagtttggct

SEQ ID NO: 219 - RNA, 19 nt, synthetic construct
  source 1..19: mol_type = other RNA
acacattccaagtttggct

SEQ ID NO: 220 - RNA, 19 nt, synthetic construct
  source 1..19: mol_type = other RNA
ncacattccaagtttggct

SEQ ID NO: 221 - RNA, 19 nt, synthetic construct
  source 1..19: mol_type = other RNA
ncacattccaagtttggcn

SEQ ID NO: 222 - RNA, 19 nt, synthetic construct
  source 1..19: mol_type = other RNA
cgtactatttctctattgc

SEQ ID NO: 223 - RNA, 19 nt, synthetic construct
  source 1..19: mol_type = other RNA
tgtactatttctctattgc

SEQ ID NO: 224 - RNA, 19 nt, synthetic construct
  source 1..19: mol_type = other RNA
agtactatttctctattgc

SEQ ID NO: 225 - RNA, 19 nt, synthetic construct
  source 1..19: mol_type = other RNA
ngtactatttctctattgc

SEQ ID NO: 226 - RNA, 19 nt, synthetic construct
  source 1..19: mol_type = other RNA
ngtactatttctctattgn

SEQ ID NO: 227 - RNA, 19 nt, synthetic construct
  source 1..19: mol_type = other RNA
gttctgacagacataatca

SEQ ID NO: 228 - RNA, 19 nt, synthetic construct
  source 1..19: mol_type = other RNA
tttctgacagacataatca

SEQ ID NO: 229 - RNA, 19 nt, synthetic construct
  source 1..19: mol_type = other RNA
attctgacagacataatca

SEQ ID NO: 230 - RNA, 19 nt, synthetic construct
  source 1..19: mol_type = other RNA
nttctgacagacataatca

SEQ ID NO: 231 - RNA, 19 nt, synthetic construct
  source 1..19: mol_type = other RNA
nttctgacagacataatcn

SEQ ID NO: 232 - RNA, 19 nt, synthetic construct
  source 1..19: mol_type = other RNA
gagtcatggaggttctgac

SEQ ID NO: 233 - RNA, 19 nt, synthetic construct
  source 1..19: mol_type = other RNA
tagtcatggaggttctgac

SEQ ID NO: 234 - RNA, 19 nt, synthetic construct
  source 1..19: mol_type = other RNA
aagtcatggaggttctgac

SEQ ID NO: 235 - RNA, 19 nt, synthetic construct
  source 1..19: mol_type = other RNA
nagtcatggaggttctgac

SEQ ID NO: 236 - RNA, 19 nt, synthetic construct
  source 1..19: mol_type = other RNA
nagtcatggaggttctgan

SEQ ID NO: 237 - RNA, 19 nt, synthetic construct
  source 1..19: mol_type = other RNA
tgaatgtgatttacaatga

SEQ ID NO: 238 - RNA, 19 nt, synthetic construct
  source 1..19: mol_type = other RNA
agaatgtgatttacaatga

SEQ ID NO: 239 - RNA, 19 nt, synthetic construct
  source 1..19: mol_type = other RNA
ngaatgtgatttacaatga

SEQ ID NO: 240 - RNA, 19 nt, synthetic construct
  source 1..19: mol_type = other RNA
ngaatgtgatttacaatgn

SEQ ID NO: 241 - RNA, 19 nt, synthetic construct
  source 1..19: mol_type = other RNA
cactgatgaagtcctgtac

SEQ ID NO: 242 - RNA, 19 nt, synthetic construct
  source 1..19: mol_type = other RNA
tactgatgaagtcctgtac

SEQ ID NO: 243 - RNA, 19 nt, synthetic construct
  source 1..19: mol_type = other RNA
aactgatgaagtcctgtac

SEQ ID NO: 244 - RNA, 19 nt, synthetic construct
  source 1..19: mol_type = other RNA
nactgatgaagtcctgtac

SEQ ID NO: 245 - RNA, 19 nt, synthetic construct
  source 1..19: mol_type = other RNA
nactgatgaagtcctgtan

SEQ ID NO: 246 - RNA, 19 nt, synthetic construct
  source 1..19: mol_type = other RNA
cacaacgagactgaattgc

SEQ ID NO: 247 - RNA, 19 nt, synthetic construct
  source 1..19: mol_type = other RNA
tacaacgagactgaattgc

SEQ ID NO: 248 - RNA, 19 nt, synthetic construct
  source 1..19: mol_type = other RNA
aacaacgagactgaattgc

SEQ ID NO: 249 - RNA, 19 nt, synthetic construct
  source 1..19: mol_type = other RNA
nacaacgagactgaattgc

SEQ ID NO: 250 - RNA, 19 nt, synthetic construct
  source 1..19: mol_type = other RNA
nacaacgagactgaattgn

SEQ ID NO: 251 - RNA, 19 nt, synthetic construct
  source 1..19: mol_type = other RNA
ttgagttcttccattggca

SEQ ID NO: 252 - RNA, 19 nt, synthetic construct
  source 1..19: mol_type = other RNA
atgagttcttccattggca

SEQ ID NO: 253 - RNA, 19 nt, synthetic construct
  source 1..19: mol_type = other RNA
ntgagttcttccattggca

SEQ ID NO: 254 - RNA, 19 nt, synthetic construct
  source 1..19: mol_type = other RNA
ntgagttcttccattggcn

SEQ ID NO: 255 - RNA, 19 nt, synthetic construct
  source 1..19: mol_type = other RNA
gactaagtgagtcttgcat

SEQ ID NO: 256 - RNA, 19 nt, synthetic construct
  source 1..19: mol_type = other RNA
tactaagtgagtcttgcat

SEQ ID NO: 257 - RNA, 19 nt, synthetic construct
  source 1..19: mol_type = other RNA
aactaagtgagtcttgcat

SEQ ID NO: 258 - RNA, 19 nt, synthetic construct
  source 1..19: mol_type = other RNA
nactaagtgagtcttgcat

SEQ ID NO: 259 - RNA, 19 nt, synthetic construct
  source 1..19: mol_type = other RNA
nactaagtgagtcttgcan

SEQ ID NO: 260 - RNA, 19 nt, synthetic construct
  source 1..19: mol_type = other RNA
ccagaaatttcactcatcc

SEQ ID NO: 261 - RNA, 19 nt, synthetic construct
  source 1..19: mol_type = other RNA
tcagaaatttcactcatcc

SEQ ID NO: 262 - RNA, 19 nt, synthetic construct
  source 1..19: mol_type = other RNA
acagaaatttcactcatcc

SEQ ID NO: 263 - RNA, 19 nt, synthetic construct
  source 1..19: mol_type = other RNA
ncagaaatttcactcatcc

SEQ ID NO: 264 - RNA, 19 nt, synthetic construct
  source 1..19: mol_type = other RNA
ncagaaatttcactcatcn

SEQ ID NO: 265 - RNA, 19 nt, synthetic construct
  source 1..19: mol_type = other RNA
agatcattcaatttgctcc

SEQ ID NO: 266 - RNA, 19 nt, synthetic construct
  source 1..19: mol_type = other RNA
tgatcattcaatttgctcc

SEQ ID NO: 267 - RNA, 19 nt, synthetic construct
  source 1..19: mol_type = other RNA
ngatcattcaatttgctcc

SEQ ID NO: 268 - RNA, 19 nt, synthetic construct
  source 1..19: mol_type = other RNA
ngatcattcaatttgctcn

SEQ ID NO: 269 - RNA, 19 nt, synthetic construct
  source 1..19: mol_type = other RNA
ctcaggttctgcttttacc

SEQ ID NO: 270 - RNA, 19 nt, synthetic construct
  source 1..19: mol_type = other RNA
ctcaggttctgcttttaca

SEQ ID NO: 271 - RNA, 19 nt, synthetic construct
  source 1..19: mol_type = other RNA
ctcaggttctgcttttact

SEQ ID NO: 272 - RNA, 19 nt, synthetic construct
  source 1..19: mol_type = other RNA
ctcaggttctgcttttacn

SEQ ID NO: 273 - RNA, 19 nt, synthetic construct
  source 1..19: mol_type = other RNA
ntcaggttctgcttttacn

SEQ ID NO: 274 - RNA, 19 nt, synthetic construct
  source 1..19: mol_type = other RNA
gaccctggaaaagctgatg

SEQ ID NO: 275 - RNA, 19 nt, synthetic construct
  source 1..19: mol_type = other RNA
gaccctggaaaagctgata

SEQ ID NO: 276 - RNA, 19 nt, synthetic construct
  source 1..19: mol_type = other RNA
gaccctggaaaagctgatt

SEQ ID NO: 277 - RNA, 19 nt, synthetic construct
  source 1..19: mol_type = other RNA
gaccctggaaaagctgatn

SEQ ID NO: 278 - RNA, 19 nt, synthetic construct
  source 1..19: mol_type = other RNA
naccctggaaaagctgatn

SEQ ID NO: 279 - RNA, 19 nt, synthetic construct
  source 1..19: mol_type = other RNA
accctggaaaagctgatga

SEQ ID NO: 280 - RNA, 19 nt, synthetic construct
  source 1..19: mol_type = other RNA
accctggaaaagctgatgt

SEQ ID NO: 281 - RNA, 19 nt, synthetic construct
  source 1..19: mol_type = other RNA
accctggaaaagctgatgn

SEQ ID NO: 282 - RNA, 19 nt, synthetic construct
  source 1..19: mol_type = other RNA
nccctggaaaagctgatgn

SEQ ID NO: 283 - RNA, 19 nt, synthetic construct
  source 1..19: mol_type = other RNA
ccctggaaaagctgatgaa

SEQ ID NO: 284 - RNA, 19 nt, synthetic construct
  source 1..19: mol_type = other RNA
ccctggaaaagctgatgat

SEQ ID NO: 285 - RNA, 19 nt, synthetic construct
  source 1..19: mol_type = other RNA
ccctggaaaagctgatgan

SEQ ID NO: 286 - RNA, 19 nt, synthetic construct
  source 1..19: mol_type = other RNA
ncctggaaaagctgatgan

SEQ ID NO: 287 - RNA, 19 nt, synthetic construct
  source 1..19: mol_type = other RNA
gaaaagctgatgaaggcct

SEQ ID NO: 288 - RNA, 19 nt, synthetic construct
  source 1..19: mol_type = other RNA
gaaaagctgatgaaggcca

SEQ ID NO: 289 - RNA, 19 nt, synthetic construct
  source 1..19: mol_type = other RNA
gaaaagctgatgaaggccn

SEQ ID NO: 290 - RNA, 19 nt, synthetic construct
  source 1..19: mol_type = other RNA
naaaagctgatgaaggccn

SEQ ID NO: 291 - RNA, 19 nt, synthetic construct
  source 1..19: mol_type = other RNA
tgatgaaggccttcgagtc

SEQ ID NO: 292 - RNA, 19 nt, synthetic construct
  source 1..19: mol_type = other RNA
tgatgaaggccttcgagta

SEQ ID NO: 293 - RNA, 19 nt, synthetic construct
  source 1..19: mol_type = other RNA
tgatgaaggccttcgagtt

SEQ ID NO: 294 - RNA, 19 nt, synthetic construct
  source 1..19: mol_type = other RNA
tgatgaaggccttcgagtn

SEQ ID NO: 295 - RNA, 19 nt, synthetic construct
  source 1..19: mol_type = other RNA
ngatgaaggccttcgagtn

SEQ ID NO: 296 - RNA, 19 nt, synthetic construct
  source 1..19: mol_type = other RNA
gatgaaggccttcgagtcc

SEQ ID NO: 297 - RNA, 19 nt, synthetic construct
  source 1..19: mol_type = other RNA
gatgaaggccttcgagtca

SEQ ID NO: 298 - RNA, 19 nt, synthetic construct
  source 1..19: mol_type = other RNA
gatgaaggccttcgagtct

SEQ ID NO: 299 - RNA, 19 nt, synthetic construct
  source 1..19: mol_type = other RNA
gatgaaggccttcgagtcn

SEQ ID NO: 300 - RNA, 19 nt, synthetic construct
  source 1..19: mol_type = other RNA
natgaaggccttcgagtcn

SEQ ID NO: 301 - RNA, 19 nt, synthetic construct
  source 1..19: mol_type = other RNA
ccttcgagtccctcaagtc

SEQ ID NO: 302 - RNA, 19 nt, synthetic construct
  source 1..19: mol_type = other RNA
ccttcgagtccctcaagta

SEQ ID NO: 303 - RNA, 19 nt, synthetic construct
  source 1..19: mol_type = other RNA
ccttcgagtccctcaagtt

SEQ ID NO: 304 - RNA, 19 nt, synthetic construct
  source 1..19: mol_type = other RNA
ccttcgagtccctcaagtn

SEQ ID NO: 305 - RNA, 19 nt, synthetic construct
  source 1..19: mol_type = other RNA
ncttcgagtccctcaagtn

SEQ ID NO: 306 - RNA, 19 nt, synthetic construct
  source 1..19: mol_type = other RNA
cttcgagtccctcaagtcc

SEQ ID NO: 307 - RNA, 19 nt, synthetic construct
  source 1..19: mol_type = other RNA
cttcgagtccctcaagtca

SEQ ID NO: 308 - RNA, 19 nt, synthetic construct
  source 1..19: mol_type = other RNA
cttcgagtccctcaagtct

SEQ ID NO: 309 - RNA, 19 nt, synthetic construct
  source 1..19: mol_type = other RNA
cttcgagtccctcaagtcn

SEQ ID NO: 310 - RNA, 19 nt, synthetic construct
  source 1..19: mol_type = other RNA
nttcgagtccctcaagtcn

SEQ ID NO: 311 - RNA, 19 nt, synthetic construct
  source 1..19: mol_type = other RNA
ctgcaccgaccaaagaaag

SEQ ID NO: 312 - RNA, 19 nt, synthetic construct
  source 1..19: mol_type = other RNA
ctgcaccgaccaaagaaaa

SEQ ID NO: 313 - RNA, 19 nt, synthetic construct
  source 1..19: mol_type = other RNA
ctgcaccgaccaaagaaat

SEQ ID NO: 314 - RNA, 19 nt, synthetic construct
  source 1..19: mol_type = other RNA
ctgcaccgaccaaagaaan

SEQ ID NO: 315 - RNA, 19 nt, synthetic construct
  source 1..19: mol_type = other RNA
ntgcaccgaccaaagaaan

SEQ ID NO: 316 - RNA, 19 nt, synthetic construct
  source 1..19: mol_type = other RNA
tgcaccgaccaaagaaaga

SEQ ID NO: 317 - RNA, 19 nt, synthetic construct
  source 1..19: mol_type = other RNA
tgcaccgaccaaagaaagt

SEQ ID NO: 318 - RNA, 19 nt, synthetic construct
  source 1..19: mol_type = other RNA
tgcaccgaccaaagaaagn

SEQ ID NO: 319 - DNA, 19 bp, synthetic construct
  source 1..19: mol_type = other DNA
ngcaccgaccaaagaaagn

SEQ ID NO: 320 - DNA, 19 bp, synthetic construct
  source 1..19: mol_type = other DNA
gcaccgaccaaagaaagaa

SEQ ID NO: 321 - RNA, 19 nt, synthetic construct
  source 1..19: mol_type = other RNA
gcaccgaccaaagaaagat

SEQ ID NO: 322 - DNA, 19 bp, synthetic construct
  source 1..19: mol_type = other DNA
gcaccgaccaaagaaagan

SEQ ID NO: 323 - DNA, 19 bp, synthetic construct
  source 1..19: mol_type = other DNA
ncaccgaccaaagaaagan

SEQ ID NO: 324 - RNA, 19 nt, synthetic construct
  source 1..19: mol_type = other RNA
tcgctatggaactttttct

SEQ ID NO: 325 - RNA, 19 nt, synthetic construct
  source 1..19: mol_type = other RNA
tcgctatggaactttttca

SEQ ID NO: 326 - RNA, 19 nt, synthetic construct
  source 1..19: mol_type = other RNA
tcgctatggaactttttcn

SEQ ID NO: 327 - RNA, 19 nt, synthetic construct
  source 1..19: mol_type = other RNA
ncgctatggaactttttcn

SEQ ID NO: 328 - RNA, 19 nt, synthetic construct
  source 1..19: mol_type = other RNA
tttgatggattctaatctt

SEQ ID NO: 329 - RNA, 19 nt, synthetic construct
  source 1..19: mol_type = other RNA
tttgatggattctaatcta

SEQ ID NO: 330 - RNA, 19 nt, synthetic construct
  source 1..19: mol_type = other RNA
tttgatggattctaatctn

SEQ ID NO: 331 - RNA, 19 nt, synthetic construct
  source 1..19: mol_type = other RNA
nttgatggattctaatctn

SEQ ID NO: 332 - RNA, 19 nt, synthetic construct
  source 1..19: mol_type = other RNA
tggattctaatcttccaag

SEQ ID NO: 333 - RNA, 19 nt, synthetic construct
  source 1..19: mol_type = other RNA
tggattctaatcttccaaa

SEQ ID NO: 334 - RNA, 19 nt, synthetic construct
  source 1..19: mol_type = other RNA
tggattctaatcttccaat

SEQ ID NO: 335 - RNA, 19 nt, synthetic construct
  source 1..19: mol_type = other RNA
tggattctaatcttccaan

SEQ ID NO: 336 - RNA, 19 nt, synthetic construct
  source 1..19: mol_type = other RNA
nggattctaatcttccaan

SEQ ID NO: 337 - RNA, 19 nt, synthetic construct
  source 1..19: mol_type = other RNA
gcaattttgcaaatgacaa

SEQ ID NO: 338 - RNA, 19 nt, synthetic construct
  source 1..19: mol_type = other RNA
gcaattttgcaaatgacat

SEQ ID NO: 339 - RNA, 19 nt, synthetic construct
  source 1..19: mol_type = other RNA
gcaattttgcaaatgacan

SEQ ID NO: 340 - RNA, 19 nt, synthetic construct
  source 1..19: mol_type = other RNA
ncaattttgcaaatgacan

SEQ ID NO: 341 - RNA, 19 nt, synthetic construct
  source 1..19: mol_type = other RNA
gacgttacatcatacacag

SEQ ID NO: 342 - RNA, 19 nt, synthetic construct
  source 1..19: mol_type = other RNA
gacgttacatcatacacaa

SEQ ID NO: 343 - RNA, 19 nt, synthetic construct
  source 1..19: mol_type = other RNA
gacgttacatcatacacat

SEQ ID NO: 344 - RNA, 19 nt, synthetic construct
  source 1..19: mol_type = other RNA
gacgttacatcatacacan

SEQ ID NO: 345 - RNA, 19 nt, synthetic construct
  source 1..19: mol_type = other RNA
nacgttacatcatacacan

SEQ ID NO: 346 - RNA, 19 nt, synthetic construct
  source 1..19: mol_type = other RNA
accaagaccacaatgttgt

SEQ ID NO: 347 - RNA, 19 nt, synthetic construct
  source 1..19: mol_type = other RNA
accaagaccacaatgttga

SEQ ID NO: 348 - RNA, 19 nt, synthetic construct
  source 1..19: mol_type = other RNA
accaagaccacaatgttgn

SEQ ID NO: 349 - RNA, 19 nt, synthetic construct
  source 1..19: mol_type = other RNA
nccaagaccacaatgttgn

SEQ ID NO: 350 - RNA, 19 nt, synthetic construct
  source 1..19: mol_type = other RNA
gtattgtggaacttatagc

SEQ ID NO: 351 - RNA, 19 nt, synthetic construct
  source 1..19: mol_type = other RNA
gtattgtggaacttataga

SEQ ID NO: 352 - RNA, 19 nt, synthetic construct
  source 1..19: mol_type = other RNA
gtattgtggaacttatagt

SEQ ID NO: 353 - RNA, 19 nt, synthetic construct
  source 1..19: mol_type = other RNA
gtattgtggaacttatagn

SEQ ID NO: 354 - RNA, 19 nt, synthetic construct
  source 1..19: mol_type = other RNA
ntattgtggaacttatagn

SEQ ID NO: 355 - RNA, 19 nt, synthetic construct
  source 1..19: mol_type = other RNA
tgaactacatcgatcatgg

SEQ ID NO: 356 - RNA, 19 nt, synthetic construct
  source 1..19: mol_type = other RNA
tgaactacatcgatcatga

SEQ ID NO: 357 - RNA, 19 nt, synthetic construct
  source 1..19: mol_type = other RNA
tgaactacatcgatcatgt

SEQ ID NO: 358 - RNA, 19 nt, synthetic construct
  source 1..19: mol_type = other RNA
tgaactacatcgatcatgn

SEQ ID NO: 359 - RNA, 19 nt, synthetic construct
  source 1..19: mol_type = other RNA
ngaactacatcgatcatgn

SEQ ID NO: 360 - RNA, 19 nt, synthetic construct
  source 1..19: mol_type = other RNA
gatgctgtgaagctttgtg

SEQ ID NO: 361 - RNA, 19 nt, synthetic construct
  source 1..19: mol_type = other RNA
gatgctgtgaagctttgta

SEQ ID NO: 362 - RNA, 19 nt, synthetic construct
  source 1..19: mol_type = other RNA
gatgctgtgaagctttgtt

SEQ ID NO: 363 - RNA, 19 nt, synthetic construct
  source 1..19: mol_type = other RNA
gatgctgtgaagctttgtn

SEQ ID NO: 364 - RNA, 19 nt, synthetic construct
  source 1..19: mol_type = other RNA
natgctgtgaagctttgtn

SEQ ID NO: 365 - RNA, 19 nt, synthetic construct
  source 1..19: mol_type = other RNA
ggtcctgttacaacaagta

SEQ ID NO: 366 - RNA, 19 nt, synthetic construct
  source 1..19: mol_type = other RNA
ggtcctgttacaacaagtt

SEQ ID NO: 367 - RNA, 19 nt, synthetic construct
  source 1..19: mol_type = other RNA
ggtcctgttacaacaagtn

SEQ ID NO: 368 - RNA, 19 nt, synthetic construct
  source 1..19: mol_type = other RNA
ngtcctgttacaacaagtn

SEQ ID NO: 369 - RNA, 19 nt, synthetic construct
  source 1..19: mol_type = other RNA
acaagtaaatcctcatcac

SEQ ID NO: 370 - RNA, 19 nt, synthetic construct
  source 1..19: mol_type = other RNA
acaagtaaatcctcatcaa

SEQ ID NO: 371 - RNA, 19 nt, synthetic construct
  source 1..19: mol_type = other RNA
acaagtaaatcctcatcat

SEQ ID NO: 372 - RNA, 19 nt, synthetic construct
  source 1..19: mol_type = other RNA
acaagtaaatcctcatcan

SEQ ID NO: 373 - RNA, 19 nt, synthetic construct
  source 1..19: mol_type = other RNA
ncaagtaaatcctcatcan

SEQ ID NO: 374 - RNA, 19 nt, synthetic construct
  source 1..19: mol_type = other RNA
aatgatggcaactgtttgt

SEQ ID NO: 375 - RNA, 19 nt, synthetic construct
  source 1..19: mol_type = other RNA
aatgatggcaactgtttga

SEQ ID NO: 376 - RNA, 19 nt, synthetic construct
  source 1..19: mol_type = other RNA
aatgatggcaactgtttgn

SEQ ID NO: 377 - RNA, 19 nt, synthetic construct
  source 1..19: mol_type = other RNA
natgatggcaactgtttgn

SEQ ID NO: 378 - RNA, 19 nt, synthetic construct
  source 1..19: mol_type = other RNA
ggtgtttattggctttgta

SEQ ID NO: 379 - RNA, 19 nt, synthetic construct
  source 1..19: mol_type = other RNA
ggtgtttattggctttgtt

SEQ ID NO: 380 - RNA, 19 nt, synthetic construct
  source 1..19: mol_type = other RNA
ggtgtttattggctttgtn

SEQ ID NO: 381 - RNA, 19 nt, synthetic construct
  source 1..19: mol_type = other RNA
ngtgtttattggctttgtn

SEQ ID NO: 382 - RNA, 19 nt, synthetic construct
  source 1..19: mol_type = other RNA
acagatcattggaattcct

SEQ ID NO: 383 - RNA, 19 nt, synthetic construct
  source 1..19: mol_type = other RNA
acagatcattggaattcca

SEQ ID NO: 384 - RNA, 19 nt, synthetic construct
  source 1..19: mol_type = other RNA
acagatcattggaattccn

SEQ ID NO: 385 - RNA, 19 nt, synthetic construct
  source 1..19: mol_type = other RNA
ncagatcattggaattccn

SEQ ID NO: 386 - RNA, 19 nt, synthetic construct
  source 1..19: mol_type = other RNA
gcgactgtctcgacagata

SEQ ID NO: 387 - RNA, 19 nt, synthetic construct
  source 1..19: mol_type = other RNA
gcgactgtctcgacagatt

SEQ ID NO: 388 - RNA, 19 nt, synthetic construct
  source 1..19: mol_type = other RNA
gcgactgtctcgacagatn

SEQ ID NO: 389 - RNA, 19 nt, synthetic construct
  source 1..19: mol_type = other RNA
ncgactgtctcgacagatn

SEQ ID NO: 390 - RNA, 19 nt, synthetic construct
  source 1..19: mol_type = other RNA
cgtgagcactgttcaactg

SEQ ID NO: 391 - RNA, 19 nt, synthetic construct
  source 1..19: mol_type = other RNA
cgtgagcactgttcaacta

SEQ ID NO: 392 - RNA, 19 nt, synthetic construct
  source 1..19: mol_type = other RNA
cgtgagcactgttcaactt

SEQ ID NO: 393 - RNA, 19 nt, synthetic construct
  source 1..19: mol_type = other RNA
cgtgagcactgttcaactn

SEQ ID NO: 394 - RNA, 19 nt, synthetic construct
  source 1..19: mol_type = other RNA
ngtgagcactgttcaactn

SEQ ID NO: 395 - RNA, 19 nt, synthetic construct
  source 1..19: mol_type = other RNA
agcacaaagttacttagtc

SEQ ID NO: 396 - RNA, 19 nt, synthetic construct
  source 1..19: mol_type = other RNA
agcacaaagttacttagta

SEQ ID NO: 397 - RNA, 19 nt, synthetic construct
  source 1..19: mol_type = other RNA
agcacaaagttacttagtt

SEQ ID NO: 398 - RNA, 19 nt, synthetic construct
  source 1..19: mol_type = other RNA
agcacaaagttacttagtn

SEQ ID NO: 399 - RNA, 19 nt, synthetic construct
  source 1..19: mol_type = other RNA
ngcacaaagttacttagtn

SEQ ID NO: 400 - RNA, 19 nt, synthetic construct
  source 1..19: mol_type = other RNA
agccaaacttggaatgtgc

SEQ ID NO: 401 - RNA, 19 nt, synthetic construct
  source 1..19: mol_type = other RNA
agccaaacttggaatgtga

SEQ ID NO: 402 - RNA, 19 nt, synthetic construct
  source 1..19: mol_type = other RNA
agccaaacttggaatgtgt

SEQ ID NO: 403 - RNA, 19 nt, synthetic construct
  source 1..19: mol_type = other RNA
agccaaacttggaatgtgn

SEQ ID NO: 404 - RNA, 19 nt, synthetic construct
  source 1..19: mol_type = other RNA
ngccaaacttggaatgtgn

SEQ ID NO: 405 - RNA, 19 nt, synthetic construct
  source 1..19: mol_type = other RNA
gcaatagagaaatagtacg

SEQ ID NO: 406 - RNA, 19 nt, synthetic construct
  source 1..19: mol_type = other RNA
gcaatagagaaatagtaca

SEQ ID NO: 407 - RNA, 19 nt, synthetic construct
  source 1..19: mol_type = other RNA
gcaatagagaaatagtact

SEQ ID NO: 408 - RNA, 19 nt, synthetic construct
  source 1..19: mol_type = other RNA
gcaatagagaaatagtacn

SEQ ID NO: 409 - RNA, 19 nt, synthetic construct
  source 1..19: mol_type = other RNA
ncaatagagaaatagtacn

SEQ ID NO: 410 - RNA, 19 nt, synthetic construct
  source 1..19: mol_type = other RNA
tgattatgtctgtcagaac

SEQ ID NO: 411 - RNA, 19 nt, synthetic construct
  source 1..19: mol_type = other RNA
tgattatgtctgtcagaaa

SEQ ID NO: 412 - RNA, 19 nt, synthetic construct
  source 1..19: mol_type = other RNA
tgattatgtctgtcagaat

SEQ ID NO: 413 - RNA, 19 nt, synthetic construct
  source 1..19: mol_type = other RNA
tgattatgtctgtcagaan

SEQ ID NO: 414 - RNA, 19 nt, synthetic construct
  source 1..19: mol_type = other RNA
ngattatgtctgtcagaan

SEQ ID NO: 415 - RNA, 19 nt, synthetic construct
  source 1..19: mol_type = other RNA
gtcagaacctccatgactc

SEQ ID NO: 416 - RNA, 19 nt, synthetic construct
  source 1..19: mol_type = other RNA
gtcagaacctccatgacta

SEQ ID NO: 417 - RNA, 19 nt, synthetic construct
  source 1..19: mol_type = other RNA
gtcagaacctccatgactt

SEQ ID NO: 418 - RNA, 19 nt, synthetic construct
  source 1..19: mol_type = other RNA
gtcagaacctccatgactn

SEQ ID NO: 419 - RNA, 19 nt, synthetic construct
  source 1..19: mol_type = other RNA
ntcagaacctccatgactn

SEQ ID NO: 420 - RNA, 19 nt, synthetic construct
  source 1..19: mol_type = other RNA
tcattgtaaatcacattca

SEQ ID NO: 421 - RNA, 19 nt, synthetic construct
  source 1..19: mol_type = other RNA
tcattgtaaatcacattct

SEQ ID NO: 422 - RNA, 19 nt, synthetic construct
  source 1..19: mol_type = other RNA
tcattgtaaatcacattcn

SEQ ID NO: 423 - RNA, 19 nt, synthetic construct
  source 1..19: mol_type = other RNA
ncattgtaaatcacattcn

SEQ ID NO: 424 - RNA, 19 nt, synthetic construct
  source 1..19: mol_type = other RNA
gtacaggacttcatcagtg

SEQ ID NO: 425 - RNA, 19 nt, synthetic construct
  source 1..19: mol_type = other RNA
gtacaggacttcatcagta

SEQ ID NO: 426 - RNA, 19 nt, synthetic construct
  source 1..19: mol_type = other RNA
gtacaggacttcatcagtt

SEQ ID NO: 427 - RNA, 19 nt, synthetic construct
  source 1..19: mol_type = other RNA
gtacaggacttcatcagtn

SEQ ID NO: 428 - RNA, 19 nt, synthetic construct
  source 1..19: mol_type = other RNA
ntacaggacttcatcagtn

SEQ ID NO: 429 - RNA, 19 nt, synthetic construct
  source 1..19: mol_type = other RNA
gcaattcagtctcgttgtg

SEQ ID NO: 430 - RNA, 19 nt, synthetic construct
  source 1..19: mol_type = other RNA
gcaattcagtctcgttgta

SEQ ID NO: 431 - RNA, 19 nt, synthetic construct
  source 1..19: mol_type = other RNA
gcaattcagtctcgttgtt

SEQ ID NO: 432 - RNA, 19 nt, synthetic construct
  source 1..19: mol_type = other RNA
gcaattcagtctcgttgtn

SEQ ID NO: 433 - RNA, 19 nt, synthetic construct
  source 1..19: mol_type = other RNA
ncaattcagtctcgttgtn

SEQ ID NO: 434 - RNA, 19 nt, synthetic construct
  source 1..19: mol_type = other RNA
tgccaatggaagaactcaa

SEQ ID NO: 435 - RNA, 19 nt, synthetic construct
  source 1..19: mol_type = other RNA
tgccaatggaagaactcat

SEQ ID NO: 436 - RNA, 19 nt, synthetic construct
  source 1..19: mol_type = other RNA
tgccaatggaagaactcan

SEQ ID NO: 437 - RNA, 19 nt, synthetic construct
  source 1..19: mol_type = other RNA
ngccaatggaagaactcan

SEQ ID NO: 438 - RNA, 19 nt, synthetic construct
  source 1..19: mol_type = other RNA
atgcaagactcacttagtc

SEQ ID NO: 439 - RNA, 19 nt, synthetic construct
  source 1..19: mol_type = other RNA
atgcaagactcacttagta

SEQ ID NO: 440 - RNA, 19 nt, synthetic construct
  source 1..19: mol_type = other RNA
atgcaagactcacttagtt

SEQ ID NO: 441 - RNA, 19 nt, synthetic construct
  source 1..19: mol_type = other RNA
atgcaagactcacttagtn

SEQ ID NO: 442 - RNA, 19 nt, synthetic construct
  source 1..19: mol_type = other RNA
ntgcaagactcacttagtn

SEQ ID NO: 443 - RNA, 19 nt, synthetic construct
  source 1..19: mol_type = other RNA
ggatgagtgaaatttctgg

SEQ ID NO: 444 - RNA, 19 nt, synthetic construct
  source 1..19: mol_type = other RNA
ggatgagtgaaatttctga

SEQ ID NO: 445 - RNA, 19 nt, synthetic construct
  source 1..19: mol_type = other RNA
ggatgagtgaaatttctgt

SEQ ID NO: 446 - RNA, 19 nt, synthetic construct
  source 1..19: mol_type = other RNA
ggatgagtgaaatttctgn

SEQ ID NO: 447 - RNA, 19 nt, synthetic construct
  source 1..19: mol_type = other RNA
ngatgagtgaaatttctgn

SEQ ID NO: 448 - RNA, 19 nt, synthetic construct
  source 1..19: mol_type = other RNA
ggagcaagttgaatgatct

SEQ ID NO: 449 - RNA, 19 nt, synthetic construct
  source 1..19: mol_type = other RNA
ggagcaagttgaatgatca

SEQ ID NO: 450 - RNA, 19 nt, synthetic construct
  source 1..19: mol_type = other RNA
ggagcaagttgaatgatcn

SEQ ID NO: 451 - RNA, 19 nt, synthetic construct
  source 1..19: mol_type = other RNA
ngagcaagttgaatgatcn

SEQ ID NO: 452 - RNA, 21 nt, synthetic construct
  modified_base 1: mod_base = OTHER; note = 5'-cyclopropyl phosphonate-2'-O-methyluridine
  modified_base 1^2: mod_base = OTHER; note = phosphorothioate linkage
  modified_base 2: mod_base = OTHER; note = 2'-fluoroadenosine
  modified_base 2^3: mod_base = OTHER; note = phosphorothioate linkage
  modified_base 3: mod_base = cm
  modified_base 4: mod_base = OTHER; note = 2'-O-methyladenosine
  modified_base 5: mod_base = OTHER; note = 2'-O-methyladenosine
  modified_base 6: mod_base = cm
  modified_base 7: mod_base = OTHER; note = 2'-fluoroguanosine
  modified_base 8: mod_base = OTHER; note = 2'-O-methyladenosine
  modified_base 9: mod_base = gm
  modified_base 10: mod_base = OTHER; note = 2'-O-methyladenosine
  modified_base 11: mod_base = cm
  modified_base 12: mod_base = OTHER; note = 2'-fluorouridine
  modified_base 13: mod_base = gm
  modified_base 14: mod_base = OTHER; note = 2'-fluoroadenosine
  modified_base 15: mod_base = OTHER; note = 2'-O-methyladenosine
  modified_base 16: mod_base = OTHER; note = 2'-fluorouridine
  modified_base 17: mod_base = um
  modified_base 18: mod_base = gm
  modified_base 19: mod_base = cm
  modified_base 20: mod_base = cm
  modified_base 20^21: mod_base = OTHER; note = phosphorothioate linkage
  modified_base 21: mod_base = um
  source 1..21: mol_type = other RNA
tacaacgagactgaattgcct

SEQ ID NO: 453 - RNA, 21 nt, synthetic construct
  modified_base 1: mod_base = OTHER; note = 5'-cyclopropyl phosphonate-2'-O-methyladenosine
  modified_base 1^2: mod_base = OTHER; note = phosphorothioate linkage
  modified_base 2: mod_base = OTHER; note = 2'-fluoroguanosine
  modified_base 2^3: mod_base = OTHER; note = phosphorothioate linkage
  modified_base 3: mod_base = OTHER; note = 2'-O-methyladenosine
  modified_base 4: mod_base = um
  modified_base 5: mod_base = cm
  modified_base 6: mod_base = OTHER; note = 2'-O-methyladenosine
  modified_base 7: mod_base = OTHER; note = 2'-fluorouridine
  modified_base 8: mod_base = um
  modified_base 9: mod_base = cm
  modified_base 10: mod_base = OTHER; note = 2'-O-methyladenosine
  modified_base 11: mod_base = OTHER; note = 2'-O-methyladenosine
  modified_base 12: mod_base = OTHER; note = 2'-fluorocytidine
  modified_base 13: mod_base = um
  modified_base 14: mod_base = OTHER; note = 2'-fluorouridine
  modified_base 15: mod_base = gm
  modified_base 16: mod_base = OTHER; note = 2'-fluorocytidine
  modified_base 17: mod_base = um
  modified_base 18: mod_base = cm
  modified_base 19: mod_base = cm
  modified_base 20: mod_base = OTHER; note = 2'-O-methyladenosine
  modified_base 20^21: mod_base = OTHER; note = phosphorothioate linkage
  modified_base 21: mod_base = gm
  source 1..21: mol_type = other RNA
agatcattcaacttgctccag

SEQ ID NO: 454 - RNA, 21 nt, synthetic construct
  modified_base 1: mod_base = OTHER; note = 5'-cyclopropyl phosphonate-2'-O-methyluridine
  modified_base 1^2: mod_base = OTHER; note = phosphorothioate linkage
  modified_base 2: mod_base = OTHER; note = 2'-fluoroadenosine
  modified_base 2^3: mod_base = OTHER; note = phosphorothioate linkage
  modified_base 3: mod_base = cm
  modified_base 4: mod_base = um
  modified_base 5: mod_base = OTHER; note = 2'-O-methyladenosine
  modified_base 6: mod_base = OTHER; note = 2'-O-methyladenosine
  modified_base 7: mod_base = OTHER; note = 2'-fluoroguanosine
  modified_base 8: mod_base = um
  modified_base 9: mod_base = gm
  modified_base 10: mod_base = OTHER; note = 2'-O-methyladenosine
  modified_base 11: mod_base = gm
  modified_base 12: mod_base = OTHER; note = 2'-fluorouridine
  modified_base 13: mod_base = cm
  modified_base 14: mod_base = OTHER; note = 2'-fluorouridine
  modified_base 15: mod_base = um
  modified_base 16: mod_base = OTHER; note = 2'-fluoroguanosine
  modified_base 17: mod_base = cm
  modified_base 18: mod_base = OTHER; note = 2'-O-methyladenosine
  modified_base 19: mod_base = um
  modified_base 20: mod_base = gm
  modified_base 20^21: mod_base = OTHER; note = phosphorothioate linkage
  modified_base 21: mod_base = gm
  source 1..21: mol_type = other RNA
tactaagtgagtcttgcatgg

SEQ ID NO: 455 - RNA, 21 nt, synthetic construct
  modified_base 1: mod_base = OTHER; note = 5'-cyclopropyl phosphonate-2'-O-methyladenosine
  modified_base 1^2: mod_base = OTHER; note = phosphorothioate linkage
  modified_base 2: mod_base = OTHER; note = 2'-fluoroguanosine
  modified_base 2^3: mod_base = OTHER; note = phosphorothioate linkage
  modified_base 3: mod_base = OTHER; note = 2'-O-methyladenosine
  modified_base 4: mod_base = um
  modified_base 5: mod_base = cm
  modified_base 6: mod_base = OTHER; note = 2'-O-methyladenosine
  modified_base 7: mod_base = OTHER; note = 2'-fluorouridine
  modified_base 8: mod_base = um
  modified_base 9: mod_base = cm
  modified_base 10: mod_base = OTHER; note = 2'-O-methyladenosine
  modified_base 11: mod_base = OTHER; note = 2'-O-methyladenosine
  modified_base 12: mod_base = OTHER; note = 2'-fluorocytidine
  modified_base 13: mod_base = um
  modified_base 14: mod_base = OTHER; note = 2'-fluorouridine
  modified_base 15: mod_base = gm
  modified_base 16: mod_base = OTHER; note = 2'-fluorocytidine
  modified_base 17: mod_base = um
  modified_base 18: mod_base = cm
  modified_base 19: mod_base = cm
  modified_base 20: mod_base = OTHER; note = 2'-O-methyladenosine
  modified_base 20^21: mod_base = OTHER; note = phosphorodithioate linkage
  modified_base 21: mod_base = gm
  source 1..21: mol_type = other RNA
agatcattcaacttgctccag

SEQ ID NO: 456 - RNA, 21 nt, synthetic construct
  modified_base 1: mod_base = OTHER; note = 5'-cyclopropyl phosphonate-2'-O-methyluridine
  modified_base 1^2: mod_base = OTHER; note = phosphorothioate linkage
  modified_base 2: mod_base = OTHER; note = 2'-fluoroadenosine
  modified_base 2^3: mod_base = OTHER; note = phosphorothioate linkage
  modified_base 3: mod_base = cm
  modified_base 4: mod_base = um
  modified_base 5: mod_base = OTHER; note = 2'-O-methyladenosine
  modified_base 6: mod_base = OTHER; note = 2'-O-methyladenosine
  modified_base 7: mod_base = OTHER; note = 2'-fluoroguanosine
  modified_base 8: mod_base = um
  modified_base 9: mod_base = gm
  modified_base 10: mod_base = OTHER; note = 2'-O-methyladenosine
  modified_base 11: mod_base = gm
  modified_base 12: mod_base = OTHER; note = 2'-fluorouridine
  modified_base 13: mod_base = cm
  modified_base 14: mod_base = OTHER; note = 2'-fluorouridine
  modified_base 15: mod_base = um
  modified_base 16: mod_base = OTHER; note = 2'-fluoroguanosine
  modified_base 17: mod_base = cm
  modified_base 18: mod_base = OTHER; note = 2'-O-methyladenosine
  modified_base 19: mod_base = um
  modified_base 20: mod_base = gm
  modified_base 20^21: mod_base = OTHER; note = phosphorodithioate linkage
  modified_base 21: mod_base = gm
  source 1..21: mol_type = other RNA
tactaagtgagtcttgcatgg

SEQ ID NO: 457 - RNA, 21 nt, synthetic construct
  modified_base 1: mod_base = OTHER; note = 5'-cyclopropyl phosphonate-2'-O-methyluridine
  modified_base 1^2: mod_base = OTHER; note = phosphorothioate linkage
  modified_base 2: mod_base = OTHER; note = 2'-fluoroadenosine
  modified_base 2^3: mod_base = OTHER; note = phosphorothioate linkage
  modified_base 3: mod_base = cm
  modified_base 4: mod_base = OTHER; note = 2'-O-methyladenosine
  modified_base 5: mod_base = OTHER; note = 2'-O-methyladenosine
  modified_base 6: mod_base = cm
  modified_base 7: mod_base = OTHER; note = 2'-fluoroguanosine
  modified_base 8: mod_base = OTHER; note = 2'-O-methyladenosine
  modified_base 9: mod_base = gm
  modified_base 10: mod_base = OTHER; note = 2'-O-methyladenosine
  modified_base 11: mod_base = cm
  modified_base 12: mod_base = OTHER; note = 2'-fluorouridine
  modified_base 13: mod_base = gm
  modified_base 14: mod_base = OTHER; note = 2'-fluoroadenosine
  modified_base 15: mod_base = OTHER; note = 2'-O-methyladenosine
  modified_base 16: mod_base = OTHER; note = 2'-fluorouridine
  modified_base 17: mod_base = um
  modified_base 18: mod_base = gm
  modified_base 19: mod_base = cm
  modified_base 20: mod_base = cm
  modified_base 20^21: mod_base = OTHER; note = phosphorodithioate linkage
  modified_base 21: mod_base = um
  source 1..21: mol_type = other RNA
tacaacgagactgaattgcct

SEQ ID NO: 458 - RNA, 23 nt, synthetic construct
  modified_base 1: mod_base = OTHER; note = vinyl phosphonate 2 -O-methyluridine
  modified_base 1^2: mod_base = OTHER; note = phosphorothioate linkage
  modified_base 2: mod_base = OTHER; note = 2'-fluoroadenosine
  modified_base 2^3: mod_base = OTHER; note = phosphorothioate linkage
  modified_base 3: mod_base = um
  modified_base 4: mod_base = cm
  modified_base 5: mod_base = OTHER; note = 2'-deoxyadenosine
  modified_base 6: mod_base = gm
  modified_base 7: mod_base = OTHER; note = 2'-fluorocytidine
  modified_base 8: mod_base = um
  modified_base 9: mod_base = um
  modified_base 10: mod_base = um
  modified_base 11: mod_base = um
  modified_base 12: mod_base = OTHER; note = 2'-deoxycytidine
  modified_base 13: mod_base = cm
  modified_base 14: mod_base = OTHER; note = 2'-fluoroadenosine
  modified_base 15: mod_base = gm
  modified_base 16: mod_base = OTHER; note = 2'-deoxyguanosine
  modified_base 17: mod_base = gm
  modified_base 18: mod_base = um
  modified_base 19: mod_base = cm
  modified_base 20: mod_base = gm
  modified_base 21: mod_base = cm
  modified_base 21^22: mod_base = OTHER; note = phosphorothioate linkage
  modified_base 22: mod_base = cm
  modified_base 22^23: mod_base = OTHER; note = phosphorothioate linkage
  modified_base 23: mod_base = gm
  source 1..23: mol_type = other RNA
tatcagcttttccagggtcgccg

SEQ ID NO: 459 - RNA, 23 nt, synthetic construct
  modified_base 1: mod_base = OTHER; note = vinyl phosphonate 2 -O-methyluridine
  modified_base 1^2: mod_base = OTHER; note = phosphorothioate linkage
  modified_base 2: mod_base = OTHER; note = 2'-fluoroadenosine
  modified_base 2^3: mod_base = OTHER; note = phosphorothioate linkage
  modified_base 3: mod_base = um
  modified_base 4: mod_base = cm
  modified_base 5: mod_base = OTHER; note = 2',3'-seco-cytidine
  modified_base 6: mod_base = gm
  modified_base 7: mod_base = OTHER; note = 2'-deoxycytidine
  modified_base 8: mod_base = um
  modified_base 9: mod_base = um
  modified_base 10: mod_base = um
  modified_base 11: mod_base = um
  modified_base 12: mod_base = OTHER; note = 2'-deoxycytidine
  modified_base 13: mod_base = cm
  modified_base 14: mod_base = OTHER; note = 2'-fluoroadenosine
  modified_base 15: mod_base = gm
  modified_base 16: mod_base = OTHER; note = 2'-deoxyguanosine
  modified_base 17: mod_base = gm
  modified_base 18: mod_base = um
  modified_base 19: mod_base = cm
  modified_base 20: mod_base = gm
  modified_base 21: mod_base = cm
  modified_base 21^22: mod_base = OTHER; note = phosphorothioate linkage
  modified_base 22: mod_base = cm
  modified_base 22^23: mod_base = OTHER; note = phosphorothioate linkage
  modified_base 23: mod_base = gm
  source 1..23: mol_type = other RNA
tatcagcttttccagggtcgccg

SEQ ID NO: 460 - RNA, 21 nt, synthetic construct
  modified_base 1: mod_base = OTHER; note = 5'-cyclopropyl phosphonate-2'-O-methyluridine
  modified_base 1^2: mod_base = OTHER; note = phosphorothioate linkage
  modified_base 2: mod_base = OTHER; note = 2'-fluoroguanosine
  modified_base 2^3: mod_base = OTHER; note = phosphorothioate linkage
  modified_base 3: mod_base = OTHER; note = 2'-O-methyladenosine
  modified_base 3^4: mod_base = OTHER; note = phosphorothioate linkage
  modified_base 4: mod_base = OTHER; note = 2'-fluorocytidine
  modified_base 5: mod_base = um
  modified_base 6: mod_base = OTHER; note = 2'-fluorocytidine
  modified_base 7: mod_base = gm
  modified_base 8: mod_base = OTHER; note = 2'-O-methyladenosine
  modified_base 9: mod_base = OTHER; note = 2'-O-methyladenosine
  modified_base 10: mod_base = OTHER; note = 2'-O-methyladenosine
  modified_base 11: mod_base = gm
  modified_base 12: mod_base = OTHER; note = 2'-fluorocytidine
  modified_base 13: mod_base = cm
  modified_base 14: mod_base = OTHER; note = 2'-fluorouridine
  modified_base 15: mod_base = um
  modified_base 16: mod_base = OTHER; note = 2'-fluorocytidine
  modified_base 17: mod_base = OTHER; note = 2'-O-methyladenosine
  modified_base 18: mod_base = OTHER; note = 2'-fluorouridine
  modified_base 19: mod_base = cm
  modified_base 20: mod_base = OTHER; note = 2'-O-methyladenosine
  modified_base 20^21: mod_base = OTHER; note = phosphorothioate linkage
  modified_base 21: mod_base = gm
  source 1..21: mol_type = other RNA
tgactcgaaagccttcatcag

SEQ ID NO: 461 - RNA, 21 nt, synthetic construct
  modified_base 1: mod_base = OTHER; note = 5'-cyclopropyl phosphonate-2'-O-methyladenosine
  modified_base 1^2: mod_base = OTHER; note = phosphorothioate linkage
  modified_base 2: mod_base = OTHER; note = 2'-fluoroguanosine
  modified_base 2^3: mod_base = OTHER; note = phosphorothioate linkage
  modified_base 3: mod_base = OTHER; note = 2'-O-methyladenosine
  modified_base 4: mod_base = um
  modified_base 5: mod_base = OTHER; note = 2'-fluorocytidine
  modified_base 6: mod_base = OTHER; note = 2'-O-methyladenosine
  modified_base 7: mod_base = um
  modified_base 8: mod_base = um
  modified_base 9: mod_base = cm
  modified_base 10: mod_base = OTHER; note = 2'-O-methyladenosine
  modified_base 11: mod_base = OTHER; note = 2'-O-methyladenosine
  modified_base 12: mod_base = OTHER; note = 2'-fluorocytidine
  modified_base 13: mod_base = um
  modified_base 14: mod_base = OTHER; note = 2'-fluorouridine
  modified_base 15: mod_base = gm
  modified_base 16: mod_base = OTHER; note = 2'-fluorocytidine
  modified_base 17: mod_base = um
  modified_base 18: mod_base = cm
  modified_base 19: mod_base = cm
  modified_base 20: mod_base = OTHER; note = 2'-O-methyladenosine
  modified_base 20^21: mod_base = OTHER; note = phosphorodithioate linkage
  modified_base 21: mod_base = gm
  source 1..21: mol_type = other RNA
agatcattcaacttgctccag

SEQ ID NO: 462 - RNA, 21 nt, synthetic construct
  modified_base 1: mod_base = OTHER; note = 5'-cyclopropyl phosphonate-2'-O-methyluridine
  modified_base 1^2: mod_base = OTHER; note = phosphorothioate linkage
  modified_base 2: mod_base = OTHER; note = 2'-fluoroguanosine
  modified_base 2^3: mod_base = OTHER; note = phosphorothioate linkage
  modified_base 3: mod_base = OTHER; note = 2'-O-methyladenosine
  modified_base 4: mod_base = um
  modified_base 5: mod_base = cm
  modified_base 6: mod_base = OTHER; note = 2'-O-methyladenosine
  modified_base 7: mod_base = OTHER; note = 2'-fluorouridine
  modified_base 8: mod_base = um
  modified_base 9: mod_base = cm
  modified_base 10: mod_base = OTHER; note = 2'-O-methyladenosine
  modified_base 11: mod_base = OTHER; note = 2'-O-methyladenosine
  modified_base 12: mod_base = OTHER; note = 2'-fluorocytidine
  modified_base 13: mod_base = um
  modified_base 14: mod_base = OTHER; note = 2'-fluorouridine
  modified_base 15: mod_base = gm
  modified_base 16: mod_base = OTHER; note = 2'-fluorocytidine
  modified_base 17: mod_base = um
  modified_base 18: mod_base = cm
  modified_base 19: mod_base = cm
  modified_base 20: mod_base = OTHER; note = 2'-O-methyladenosine
  modified_base 20^21: mod_base = OTHER; note = phosphorodithioate linkage
  modified_base 21: mod_base = gm
  source 1..21: mol_type = other RNA
tgatcattcaacttgctccag

SEQ ID NO: 463 - RNA, 21 nt, synthetic construct
  modified_base 1: mod_base = OTHER; note = 5 -cyclopropyl phosphonate-2 -O-methylinosine
  modified_base 1^2: mod_base = OTHER; note = phosphorothioate linkage
  modified_base 2: mod_base = OTHER; note = 2'-fluoroguanosine
  modified_base 2^3: mod_base = OTHER; note = phosphorothioate linkage
  modified_base 3: mod_base = OTHER; note = 2'-O-methyladenosine
  modified_base 4: mod_base = um
  modified_base 5: mod_base = cm
  modified_base 6: mod_base = OTHER; note = 2'-O-methyladenosine
  modified_base 7: mod_base = OTHER; note = 2'-fluorouridine
  modified_base 8: mod_base = um
  modified_base 9: mod_base = cm
  modified_base 10: mod_base = OTHER; note = 2'-O-methyladenosine
  modified_base 11: mod_base = OTHER; note = 2'-O-methyladenosine
  modified_base 12: mod_base = OTHER; note = 2'-fluorocytidine
  modified_base 13: mod_base = um
  modified_base 14: mod_base = OTHER; note = 2'-fluorouridine
  modified_base 15: mod_base = gm
  modified_base 16: mod_base = OTHER; note = 2'-fluorocytidine
  modified_base 17: mod_base = um
  modified_base 18: mod_base = cm
  modified_base 19: mod_base = cm
  modified_base 20: mod_base = OTHER; note = 2'-O-methyladenosine
  modified_base 20^21: mod_base = OTHER; note = phosphorodithioate linkage
  modified_base 21: mod_base = gm
  source 1..21: mol_type = other RNA
ngatcattcaacttgctccag

SEQ ID NO: 464 - RNA, 21 nt, synthetic construct
  modified_base 1: mod_base = OTHER; note = 5'-cyclopropyl phosphonate-2'-O-methyladenosine
  modified_base 1^2: mod_base = OTHER; note = phosphorothioate linkage
  modified_base 2: mod_base = OTHER; note = 2'-fluoroguanosine
  modified_base 2^3: mod_base = OTHER; note = phosphorothioate linkage
  modified_base 3: mod_base = OTHER; note = 2'-O-methyladenosine
  modified_base 4: mod_base = um
  modified_base 5: mod_base = cm
  modified_base 6: mod_base = OTHER; note = 2'-O-methyladenosine
  modified_base 7: mod_base = OTHER; note = 2',3'-seco-uridine
  modified_base 8: mod_base = um
  modified_base 9: mod_base = cm
  modified_base 10: mod_base = OTHER; note = 2'-O-methyladenosine
  modified_base 11: mod_base = OTHER; note = 2'-O-methyladenosine
  modified_base 12: mod_base = OTHER; note = 2'-fluorocytidine
  modified_base 13: mod_base = um
  modified_base 14: mod_base = OTHER; note = 2'-fluorouridine
  modified_base 15: mod_base = gm
  modified_base 16: mod_base = OTHER; note = 2'-fluorocytidine
  modified_base 17: mod_base = um
  modified_base 18: mod_base = cm
  modified_base 19: mod_base = cm
  modified_base 20: mod_base = OTHER; note = 2'-O-methyladenosine
  modified_base 20^21: mod_base = OTHER; note = phosphorodithioate linkage
  modified_base 21: mod_base = gm
  source 1..21: mol_type = other RNA
agatcattcaacttgctccag

SEQ ID NO: 465 - RNA, 21 nt, synthetic construct
  modified_base 1: mod_base = OTHER; note = 5'-cyclopropyl phosphonate-2'-O-methyladenosine
  modified_base 1^2: mod_base = OTHER; note = phosphorothioate linkage
  modified_base 2: mod_base = OTHER; note = 2'-fluoroguanosine
  modified_base 2^3: mod_base = OTHER; note = phosphorothioate linkage
  modified_base 3: mod_base = OTHER; note = 2'-O-methyladenosine
  modified_base 4: mod_base = um
  modified_base 5: mod_base = cm
  modified_base 6: mod_base = OTHER; note = 2',3'-seco-adenosine
  modified_base 7: mod_base = OTHER; note = 2'-fluorouridine
  modified_base 8: mod_base = um
  modified_base 9: mod_base = cm
  modified_base 10: mod_base = OTHER; note = 2'-O-methyladenosine
  modified_base 11: mod_base = OTHER; note = 2'-O-methyladenosine
  modified_base 12: mod_base = OTHER; note = 2'-fluorocytidine
  modified_base 13: mod_base = um
  modified_base 14: mod_base = OTHER; note = 2'-fluorouridine
  modified_base 15: mod_base = gm
  modified_base 16: mod_base = OTHER; note = 2'-fluorocytidine
  modified_base 17: mod_base = um
  modified_base 18: mod_base = cm
  modified_base 19: mod_base = cm
  modified_base 20: mod_base = OTHER; note = 2'-O-methyladenosine
  modified_base 20^21: mod_base = OTHER; note = phosphorodithioate linkage
  modified_base 21: mod_base = gm
  source 1..21: mol_type = other RNA
agatcattcaacttgctccag

SEQ ID NO: 466 - RNA, 21 nt, synthetic construct
  modified_base 1: mod_base = OTHER; note = 5'-cyclopropyl phosphonate-2'-O-methyladenosine
  modified_base 1^2: mod_base = OTHER; note = phosphorothioate linkage
  modified_base 2: mod_base = OTHER; note = 2'-fluoroguanosine
  modified_base 2^3: mod_base = OTHER; note = phosphorothioate linkage
  modified_base 3: mod_base = OTHER; note = 2'-O-methyladenosine
  modified_base 4: mod_base = um
  modified_base 5: mod_base = cm
  modified_base 6: mod_base = OTHER; note = 2'-O-methyladenosine
  modified_base 7: mod_base = OTHER; note = 2'-fluorouridine
  modified_base 8: mod_base = um
  modified_base 9: mod_base = cm
  modified_base 10: mod_base = OTHER; note = 2'-O-methyladenosine
  modified_base 11: mod_base = OTHER; note = 2'-O-methyladenosine
  modified_base 12: mod_base = OTHER; note = 2'-fluorouridine
  modified_base 13: mod_base = um
  modified_base 14: mod_base = OTHER; note = 2'-fluorouridine
  modified_base 15: mod_base = gm
  modified_base 16: mod_base = OTHER; note = 2'-fluorocytidine
  modified_base 17: mod_base = um
  modified_base 18: mod_base = cm
  modified_base 19: mod_base = cm
  modified_base 20: mod_base = OTHER; note = 2'-O-methyladenosine
  modified_base 20^21: mod_base = OTHER; note = phosphorodithioate linkage
  modified_base 21: mod_base = gm
  source 1..21: mol_type = other RNA
agatcattcaatttgctccag

SEQ ID NO: 467 - RNA, 21 nt, synthetic construct
  modified_base 1: mod_base = OTHER; note = 5'-cyclopropyl phosphonate-2'-O-methyladenosine
  modified_base 1^2: mod_base = OTHER; note = phosphorothioate linkage
  modified_base 2: mod_base = OTHER; note = 2'-fluoroguanosine
  modified_base 2^3: mod_base = OTHER; note = phosphorothioate linkage
  modified_base 3: mod_base = OTHER; note = 2'-O-methyladenosine
  modified_base 4: mod_base = um
  modified_base 5: mod_base = cm
  modified_base 6: mod_base = OTHER; note = 2'-O-methyladenosine
  modified_base 7: mod_base = OTHER; note = 2'-fluorouridine
  modified_base 8: mod_base = um
  modified_base 9: mod_base = cm
  modified_base 10: mod_base = OTHER; note = 2'-O-methyladenosine
  modified_base 11: mod_base = OTHER; note = 2'-O-methyladenosine
  modified_base 12: mod_base = OTHER; note = 2'-fluorocytidine
  modified_base 13: mod_base = um
  modified_base 14: mod_base = OTHER; note = 2'-fluorouridine
  modified_base 15: mod_base = gm
  modified_base 16: mod_base = OTHER; note = 2'-fluorouridine
  modified_base 17: mod_base = um
  modified_base 18: mod_base = cm
  modified_base 19: mod_base = cm
  modified_base 20: mod_base = OTHER; note = 2'-O-methyladenosine
  modified_base 20^21: mod_base = OTHER; note = phosphorodithioate linkage
  modified_base 21: mod_base = gm
  source 1..21: mol_type = other RNA
agatcattcaacttgttccag

SEQ ID NO: 468 - RNA, 21 nt, synthetic construct
  modified_base 1: mod_base = OTHER; note = 5'-cyclopropyl phosphonate-2'-O-methyluridine
  modified_base 1^2: mod_base = OTHER; note = phosphorothioate linkage
  modified_base 2: mod_base = OTHER; note = 2'-fluoroadenosine
  modified_base 2^3: mod_base = OTHER; note = phosphorothioate linkage
  modified_base 3: mod_base = cm
  modified_base 4: mod_base = OTHER; note = 2'-O-methyladenosine
  modified_base 5: mod_base = OTHER; note = 2'-fluoroadenosine
  modified_base 6: mod_base = cm
  modified_base 7: mod_base = gm
  modified_base 8: mod_base = OTHER; note = 2'-O-methyladenosine
  modified_base 9: mod_base = gm
  modified_base 10: mod_base = OTHER; note = 2'-O-methyladenosine
  modified_base 11: mod_base = cm
  modified_base 12: mod_base = OTHER; note = 2'-fluorouridine
  modified_base 13: mod_base = gm
  modified_base 14: mod_base = OTHER; note = 2'-fluoroadenosine
  modified_base 15: mod_base = OTHER; note = 2'-O-methyladenosine
  modified_base 16: mod_base = OTHER; note = 2'-fluorouridine
  modified_base 17: mod_base = um
  modified_base 18: mod_base = gm
  modified_base 19: mod_base = cm
  modified_base 20: mod_base = cm
  modified_base 20^21: mod_base = OTHER; note = phosphorodithioate linkage
  modified_base 21: mod_base = um
  source 1..21: mol_type = other RNA
tacaacgagactgaattgcct

SEQ ID NO: 469 - RNA, 21 nt, synthetic construct
  modified_base 1: mod_base = OTHER; note = 5'-cyclopropyl phosphonate-2'-O-methyluridine
  modified_base 1^2: mod_base = OTHER; note = phosphorothioate linkage
  modified_base 2: mod_base = OTHER; note = 2'-fluoroadenosine
  modified_base 2^3: mod_base = OTHER; note = phosphorothioate linkage
  modified_base 3: mod_base = cm
  modified_base 4: mod_base = OTHER; note = 2'-O-methyladenosine
  modified_base 5: mod_base = OTHER; note = 2'-O-methyladenosine
  modified_base 6: mod_base = cm
  modified_base 7: mod_base = OTHER; note = 2',3'-seco-guanosine
  modified_base 8: mod_base = OTHER; note = 2'-O-methyladenosine
  modified_base 9: mod_base = gm
  modified_base 10: mod_base = OTHER; note = 2'-O-methyladenosine
  modified_base 11: mod_base = cm
  modified_base 12: mod_base = OTHER; note = 2'-fluorouridine
  modified_base 13: mod_base = gm
  modified_base 14: mod_base = OTHER; note = 2'-fluoroadenosine
  modified_base 15: mod_base = OTHER; note = 2'-O-methyladenosine
  modified_base 16: mod_base = OTHER; note = 2'-fluorouridine
  modified_base 17: mod_base = um
  modified_base 18: mod_base = gm
  modified_base 19: mod_base = cm
  modified_base 20: mod_base = cm
  modified_base 20^21: mod_base = OTHER; note = phosphorodithioate linkage
  modified_base 21: mod_base = um
  source 1..21: mol_type = other RNA
tacaacgagactgaattgcct

SEQ ID NO: 470 - RNA, 21 nt, synthetic construct
  modified_base 1: mod_base = OTHER; note = 5'-cyclopropyl phosphonate-2'-O-methyluridine
  modified_base 1^2: mod_base = OTHER; note = phosphorothioate linkage
  modified_base 2: mod_base = OTHER; note = 2'-fluoroadenosine
  modified_base 2^3: mod_base = OTHER; note = phosphorothioate linkage
  modified_base 3: mod_base = cm
  modified_base 4: mod_base = OTHER; note = 2'-O-methyladenosine
  modified_base 5: mod_base = OTHER; note = 2'-O-methyladenosine
  modified_base 6: mod_base = OTHER; note = 2',3'-seco-cytidine
  modified_base 7: mod_base = OTHER; note = 2'-fluoroguanosine
  modified_base 8: mod_base = OTHER; note = 2'-O-methyladenosine
  modified_base 9: mod_base = gm
  modified_base 10: mod_base = OTHER; note = 2'-O-methyladenosine
  modified_base 11: mod_base = cm
  modified_base 12: mod_base = OTHER; note = 2'-fluorouridine
  modified_base 13: mod_base = gm
  modified_base 14: mod_base = OTHER; note = 2'-fluoroadenosine
  modified_base 15: mod_base = OTHER; note = 2'-O-methyladenosine
  modified_base 16: mod_base = OTHER; note = 2'-fluorouridine
  modified_base 17: mod_base = um
  modified_base 18: mod_base = gm
  modified_base 19: mod_base = cm
  modified_base 20: mod_base = cm
  modified_base 20^21: mod_base = OTHER; note = phosphorodithioate linkage
  modified_base 21: mod_base = um
  source 1..21: mol_type = other RNA
tacaacgagactgaattgcct

SEQ ID NO: 471 - RNA, 21 nt, synthetic construct
  modified_base 1: mod_base = OTHER; note = 5'-cyclopropyl phosphonate-2'-O-methyluridine
  modified_base 1^2: mod_base = OTHER; note = phosphorothioate linkage
  modified_base 2: mod_base = OTHER; note = 2'-fluoroadenosine
  modified_base 2^3: mod_base = OTHER; note = phosphorothioate linkage
  modified_base 3: mod_base = cm
  modified_base 4: mod_base = OTHER; note = 2'-O-methyladenosine
  modified_base 5: mod_base = OTHER; note = 2'-O-methyladenosine
  modified_base 6: mod_base = um
  modified_base 7: mod_base = OTHER; note = 2'-fluoroguanosine
  modified_base 8: mod_base = OTHER; note = 2'-O-methyladenosine
  modified_base 9: mod_base = gm
  modified_base 10: mod_base = OTHER; note = 2'-O-methyladenosine
  modified_base 11: mod_base = cm
  modified_base 12: mod_base = OTHER; note = 2'-fluorouridine
  modified_base 13: mod_base = gm
  modified_base 14: mod_base = OTHER; note = 2'-fluoroadenosine
  modified_base 15: mod_base = OTHER; note = 2'-O-methyladenosine
  modified_base 16: mod_base = OTHER; note = 2'-fluorouridine
  modified_base 17: mod_base = um
  modified_base 18: mod_base = gm
  modified_base 19: mod_base = cm
  modified_base 20: mod_base = cm
  modified_base 20^21: mod_base = OTHER; note = phosphorodithioate linkage
  modified_base 21: mod_base = um
  source 1..21: mol_type = other RNA
tacaatgagactgaattgcct

SEQ ID NO: 472 - RNA, 21 nt, synthetic construct
  modified_base 1: mod_base = OTHER; note = 5'-cyclopropyl phosphonate-2'-O-methyluridine
  modified_base 1^2: mod_base = OTHER; note = phosphorodithioate linkage
  modified_base 2: mod_base = OTHER; note = 2'-fluoroadenosine
  modified_base 3: mod_base = cm
  modified_base 4: mod_base = OTHER; note = 2'-O-methyladenosine
  modified_base 5: mod_base = OTHER; note = 2'-O-methyladenosine
  modified_base 6: mod_base = cm
  modified_base 7: mod_base = OTHER; note = 2'-fluoroguanosine
  modified_base 8: mod_base = OTHER; note = 2'-O-methyladenosine
  modified_base 9: mod_base = gm
  modified_base 10: mod_base = OTHER; note = 2'-O-methyladenosine
  modified_base 11: mod_base = cm
  modified_base 12: mod_base = OTHER; note = 2'-fluorouridine
  modified_base 13: mod_base = gm
  modified_base 14: mod_base = OTHER; note = 2'-fluoroadenosine
  modified_base 15: mod_base = OTHER; note = 2'-O-methyladenosine
  modified_base 16: mod_base = OTHER; note = 2'-fluorouridine
  modified_base 17: mod_base = um
  modified_base 18: mod_base = gm
  modified_base 19: mod_base = cm
  modified_base 20: mod_base = cm
  modified_base 20^21: mod_base = OTHER; note = phosphorodithioate linkage
  modified_base 21: mod_base = um
  source 1..21: mol_type = other RNA
tacaacgagactgaattgcct

SEQ ID NO: 473 - RNA, 21 nt, synthetic construct
  modified_base 1: mod_base = OTHER; note = 5'-cyclopropyl phosphonate-2'-O-methyluridine
  modified_base 1^2: mod_base = OTHER; note = phosphorothioate linkage
  modified_base 2: mod_base = OTHER; note = 2'-fluoroadenosine
  modified_base 2^3: mod_base = OTHER; note = phosphorothioate linkage
  modified_base 3: mod_base = cm
  modified_base 4: mod_base = um
  modified_base 5: mod_base = OTHER; note = 2'-fluoroadenosine
  modified_base 6: mod_base = OTHER; note = 2'-O-methyladenosine
  modified_base 7: mod_base = gm
  modified_base 8: mod_base = um
  modified_base 9: mod_base = gm
  modified_base 10: mod_base = OTHER; note = 2'-O-methyladenosine
  modified_base 11: mod_base = gm
  modified_base 12: mod_base = OTHER; note = 2'-fluorouridine
  modified_base 13: mod_base = cm
  modified_base 14: mod_base = OTHER; note = 2'-fluorouridine
  modified_base 15: mod_base = um
  modified_base 16: mod_base = OTHER; note = 2'-fluoroguanosine
  modified_base 17: mod_base = cm
  modified_base 18: mod_base = OTHER; note = 2'-O-methyladenosine
  modified_base 19: mod_base = um
  modified_base 20: mod_base = gm
  modified_base 20^21: mod_base = OTHER; note = phosphorodithioate linkage
  modified_base 21: mod_base = gm
  source 1..21: mol_type = other RNA
tactaagtgagtcttgcatgg

SEQ ID NO: 474 - RNA, 21 nt, synthetic construct
  modified_base 1: mod_base = OTHER; note = 5'-cyclopropyl phosphonate-2'-O-methyluridine
  modified_base 1^2: mod_base = OTHER; note = phosphorothioate linkage
  modified_base 2: mod_base = OTHER; note = 2'-fluoroadenosine
  modified_base 2^3: mod_base = OTHER; note = phosphorothioate linkage
  modified_base 3: mod_base = cm
  modified_base 4: mod_base = um
  modified_base 5: mod_base = OTHER; note = 2'-O-methyladenosine
  modified_base 6: mod_base = OTHER; note = 2'-O-methyladenosine
  modified_base 7: mod_base = OTHER; note = 2',3'-seco-guanosine
  modified_base 8: mod_base = um
  modified_base 9: mod_base = gm
  modified_base 10: mod_base = OTHER; note = 2'-O-methyladenosine
  modified_base 11: mod_base = gm
  modified_base 12: mod_base = OTHER; note = 2'-fluorouridine
  modified_base 13: mod_base = cm
  modified_base 14: mod_base = OTHER; note = 2'-fluorouridine
  modified_base 15: mod_base = um
  modified_base 16: mod_base = OTHER; note = 2'-fluoroguanosine
  modified_base 17: mod_base = cm
  modified_base 18: mod_base = OTHER; note = 2'-O-methyladenosine
  modified_base 19: mod_base = um
  modified_base 20: mod_base = gm
  modified_base 20^21: mod_base = OTHER; note = phosphorodithioate linkage
  modified_base 21: mod_base = gm
  source 1..21: mol_type = other RNA
tactaagtgagtcttgcatgg

SEQ ID NO: 475 - RNA, 21 nt, synthetic construct
  modified_base 1: mod_base = OTHER; note = 5'-cyclopropyl phosphonate-2'-O-methyluridine
  modified_base 1^2: mod_base = OTHER; note = phosphorothioate linkage
  modified_base 2: mod_base = OTHER; note = 2'-fluoroadenosine
  modified_base 2^3: mod_base = OTHER; note = phosphorothioate linkage
  modified_base 3: mod_base = cm
  modified_base 4: mod_base = um
  modified_base 5: mod_base = OTHER; note = 2'-O-methyladenosine
  modified_base 6: mod_base = OTHER; note = 2',3'-seco-adenosine
  modified_base 7: mod_base = OTHER; note = 2'-fluoroguanosine
  modified_base 8: mod_base = um
  modified_base 9: mod_base = gm
  modified_base 10: mod_base = OTHER; note = 2'-O-methyladenosine
  modified_base 11: mod_base = gm
  modified_base 12: mod_base = OTHER; note = 2'-fluorouridine
  modified_base 13: mod_base = cm
  modified_base 14: mod_base = OTHER; note = 2'-fluorouridine
  modified_base 15: mod_base = um
  modified_base 16: mod_base = OTHER; note = 2'-fluoroguanosine
  modified_base 17: mod_base = cm
  modified_base 18: mod_base = OTHER; note = 2'-O-methyladenosine
  modified_base 19: mod_base = um
  modified_base 20: mod_base = gm
  modified_base 20^21: mod_base = OTHER; note = phosphorodithioate linkage
  modified_base 21: mod_base = gm
  source 1..21: mol_type = other RNA
tactaagtgagtcttgcatgg

SEQ ID NO: 476 - RNA, 21 nt, synthetic construct
  modified_base 1: mod_base = OTHER; note = 5'-cyclopropyl phosphonate-2'-O-methyluridine
  modified_base 1^2: mod_base = OTHER; note = phosphorothioate linkage
  modified_base 2: mod_base = OTHER; note = 2'-fluoroadenosine
  modified_base 2^3: mod_base = OTHER; note = phosphorothioate linkage
  modified_base 3: mod_base = cm
  modified_base 4: mod_base = um
  modified_base 5: mod_base = OTHER; note = 2'-O-methyladenosine
  modified_base 6: mod_base = OTHER; note = 2'-O-methyladenosine
  modified_base 7: mod_base = OTHER; note = 2'-fluoroguanosine
  modified_base 8: mod_base = um
  modified_base 9: mod_base = gm
  modified_base 10: mod_base = OTHER; note = 2'-O-methyladenosine
  modified_base 11: mod_base = gm
  modified_base 12: mod_base = OTHER; note = 2'-fluorouridine
  modified_base 13: mod_base = um
  modified_base 14: mod_base = OTHER; note = 2'-fluorouridine
  modified_base 15: mod_base = um
  modified_base 16: mod_base = OTHER; note = 2'-fluoroguanosine
  modified_base 17: mod_base = cm
  modified_base 18: mod_base = OTHER; note = 2'-O-methyladenosine
  modified_base 19: mod_base = um
  modified_base 20: mod_base = gm
  modified_base 20^21: mod_base = OTHER; note = phosphorodithioate linkage
  modified_base 21: mod_base = gm
  source 1..21: mol_type = other RNA
tactaagtgagttttgcatgg

SEQ ID NO: 477 - RNA, 21 nt, synthetic construct
  modified_base 1: mod_base = OTHER; note = 5'-cyclopropyl phosphonate-2'-O-methyluridine
  modified_base 1^2: mod_base = OTHER; note = phosphorothioate linkage
  modified_base 2: mod_base = OTHER; note = 2'-fluoroadenosine
  modified_base 2^3: mod_base = OTHER; note = phosphorothioate linkage
  modified_base 3: mod_base = cm
  modified_base 4: mod_base = um
  modified_base 5: mod_base = OTHER; note = 2'-O-methyladenosine
  modified_base 6: mod_base = OTHER; note = 2'-O-methyladenosine
  modified_base 7: mod_base = OTHER; note = 2'-fluoroguanosine
  modified_base 8: mod_base = um
  modified_base 9: mod_base = gm
  modified_base 10: mod_base = OTHER; note = 2'-O-methyladenosine
  modified_base 11: mod_base = gm
  modified_base 12: mod_base = OTHER; note = 2'-fluorouridine
  modified_base 13: mod_base = cm
  modified_base 14: mod_base = OTHER; note = 2'-fluorouridine
  modified_base 15: mod_base = um
  modified_base 16: mod_base = OTHER; note = 2'-fluoroguanosine
  modified_base 17: mod_base = um
  modified_base 18: mod_base = OTHER; note = 2'-O-methyladenosine
  modified_base 19: mod_base = um
  modified_base 20: mod_base = gm
  modified_base 20^21: mod_base = OTHER; note = phosphorodithioate linkage
  modified_base 21: mod_base = gm
  source 1..21: mol_type = other RNA
tactaagtgagtcttgtatgg

SEQ ID NO: 478 - RNA, 21 nt, synthetic construct
  modified_base 1: mod_base = OTHER; note = 5'-cyclopropyl phosphonate-2'-O-methyluridine
  modified_base 1^2: mod_base = OTHER; note = phosphorodithioate linkage
  modified_base 2: mod_base = OTHER; note = 2'-fluoroadenosine
  modified_base 3: mod_base = cm
  modified_base 4: mod_base = um
  modified_base 5: mod_base = OTHER; note = 2'-O-methyladenosine
  modified_base 6: mod_base = OTHER; note = 2'-O-methyladenosine
  modified_base 7: mod_base = OTHER; note = 2'-fluoroguanosine
  modified_base 8: mod_base = um
  modified_base 9: mod_base = gm
  modified_base 10: mod_base = OTHER; note = 2'-O-methyladenosine
  modified_base 11: mod_base = gm
  modified_base 12: mod_base = OTHER; note = 2'-fluorouridine
  modified_base 13: mod_base = cm
  modified_base 14: mod_base = OTHER; note = 2'-fluorouridine
  modified_base 15: mod_base = um
  modified_base 16: mod_base = OTHER; note = 2'-fluoroguanosine
  modified_base 17: mod_base = cm
  modified_base 18: mod_base = OTHER; note = 2'-O-methyladenosine
  modified_base 19: mod_base = um
  modified_base 20: mod_base = gm
  modified_base 20^21: mod_base = OTHER; note = phosphorodithioate linkage
  modified_base 21: mod_base = gm
  source 1..21: mol_type = other RNA
tactaagtgagtcttgcatgg

SEQ ID NO: 479 - RNA, 21 nt, synthetic construct
  modified_base 1: mod_base = OTHER; note = 5'-cyclopropyl phosphonate-2'-O-methyladenosine
  modified_base 1^2: mod_base = OTHER; note = phosphorothioate linkage
  modified_base 2: mod_base = OTHER; note = 2'-fluoroguanosine
  modified_base 2^3: mod_base = OTHER; note = phosphorothioate linkage
  modified_base 3: mod_base = OTHER; note = 2'-O-methyladenosine
  modified_base 4: mod_base = um
  modified_base 5: mod_base = um
  modified_base 6: mod_base = OTHER; note = 2'-O-methyladenosine
  modified_base 7: mod_base = OTHER; note = 2'-fluorouridine
  modified_base 8: mod_base = um
  modified_base 9: mod_base = cm
  modified_base 10: mod_base = OTHER; note = 2'-O-methyladenosine
  modified_base 11: mod_base = OTHER; note = 2'-O-methyladenosine
  modified_base 12: mod_base = OTHER; note = 2'-fluorocytidine
  modified_base 13: mod_base = um
  modified_base 14: mod_base = OTHER; note = 2'-fluorouridine
  modified_base 15: mod_base = gm
  modified_base 16: mod_base = OTHER; note = 2'-fluorocytidine
  modified_base 17: mod_base = um
  modified_base 18: mod_base = cm
  modified_base 19: mod_base = cm
  modified_base 20: mod_base = OTHER; note = 2'-O-methyladenosine
  modified_base 20^21: mod_base = OTHER; note = phosphorodithioate linkage
  modified_base 21: mod_base = gm
  source 1..21: mol_type = other RNA
agattattcaacttgctccag

SEQ ID NO: 480 - RNA, 21 nt, synthetic construct
  modified_base 1: mod_base = OTHER; note = 5 -cyclopropyl phosphonate-2 -O-methylinosine
  modified_base 1^2: mod_base = OTHER; note = phosphorothioate linkage
  modified_base 2: mod_base = OTHER; note = 2'-fluoroguanosine
  modified_base 2^3: mod_base = OTHER; note = phosphorothioate linkage
  modified_base 3: mod_base = OTHER; note = 2'-O-methyladenosine
  modified_base 4: mod_base = um
  modified_base 5: mod_base = OTHER; note = 2'-fluorocytidine
  modified_base 6: mod_base = OTHER; note = 2'-O-methyladenosine
  modified_base 7: mod_base = um
  modified_base 8: mod_base = um
  modified_base 9: mod_base = cm
  modified_base 10: mod_base = OTHER; note = 2'-O-methyladenosine
  modified_base 11: mod_base = OTHER; note = 2'-O-methyladenosine
  modified_base 12: mod_base = OTHER; note = 2'-fluorocytidine
  modified_base 13: mod_base = um
  modified_base 14: mod_base = OTHER; note = 2'-fluorouridine
  modified_base 15: mod_base = gm
  modified_base 16: mod_base = OTHER; note = 2'-fluorocytidine
  modified_base 17: mod_base = um
  modified_base 18: mod_base = cm
  modified_base 19: mod_base = cm
  modified_base 20: mod_base = OTHER; note = 2'-O-methyladenosine
  modified_base 20^21: mod_base = OTHER; note = phosphorodithioate linkage
  modified_base 21: mod_base = gm
  source 1..21: mol_type = other RNA
ngatcattcaacttgctccag

SEQ ID NO: 481 - RNA, 21 nt, synthetic construct
  modified_base 1: mod_base = OTHER; note = 5'-cyclopropyl phosphonate-2'-O-methyluridine
  modified_base 1^2: mod_base = OTHER; note = phosphorothioate linkage
  modified_base 2: mod_base = OTHER; note = 2'-fluoroguanosine
  modified_base 2^3: mod_base = OTHER; note = phosphorothioate linkage
  modified_base 3: mod_base = OTHER; note = 2'-O-methyladenosine
  modified_base 4: mod_base = um
  modified_base 5: mod_base = OTHER; note = 2'-fluorocytidine
  modified_base 6: mod_base = OTHER; note = 2'-O-methyladenosine
  modified_base 7: mod_base = um
  modified_base 8: mod_base = um
  modified_base 9: mod_base = cm
  modified_base 10: mod_base = OTHER; note = 2'-O-methyladenosine
  modified_base 11: mod_base = OTHER; note = 2'-O-methyladenosine
  modified_base 12: mod_base = OTHER; note = 2'-fluorocytidine
  modified_base 13: mod_base = um
  modified_base 14: mod_base = OTHER; note = 2'-fluorouridine
  modified_base 15: mod_base = gm
  modified_base 16: mod_base = OTHER; note = 2'-fluorocytidine
  modified_base 17: mod_base = um
  modified_base 18: mod_base = cm
  modified_base 19: mod_base = cm
  modified_base 20: mod_base = OTHER; note = 2'-O-methyladenosine
  modified_base 20^21: mod_base = OTHER; note = phosphorodithioate linkage
  modified_base 21: mod_base = gm
  source 1..21: mol_type = other RNA
tgatcattcaacttgctccag

SEQ ID NO: 482 - RNA, 21 nt, synthetic construct
  modified_base 1: mod_base = OTHER; note = 5'-cyclopropyl phosphonate-2'-O-methyladenosine
  modified_base 1^2: mod_base = OTHER; note = phosphorothioate linkage
  modified_base 2: mod_base = OTHER; note = 2'-fluoroguanosine
  modified_base 2^3: mod_base = OTHER; note = phosphorothioate linkage
  modified_base 3: mod_base = gm
  modified_base 3^4: mod_base = OTHER; note = phosphorothioate linkage
  modified_base 4: mod_base = OTHER; note = 2'-fluoroadenosine
  modified_base 5: mod_base = OTHER; note = 2'-O-methyladenosine
  modified_base 6: mod_base = OTHER; note = 2'-fluorouridine
  modified_base 7: mod_base = um
  modified_base 8: mod_base = cm
  modified_base 9: mod_base = cm
  modified_base 10: mod_base = OTHER; note = 2'-O-methyladenosine
  modified_base 11: mod_base = OTHER; note = 2'-O-methyladenosine
  modified_base 12: mod_base = OTHER; note = 2'-fluorouridine
  modified_base 13: mod_base = gm
  modified_base 14: mod_base = OTHER; note = 2'-fluoroadenosine
  modified_base 15: mod_base = um
  modified_base 16: mod_base = OTHER; note = 2'-fluorocytidine
  modified_base 17: mod_base = um
  modified_base 18: mod_base = OTHER; note = 2'-fluoroguanosine
  modified_base 19: mod_base = um
  modified_base 20: mod_base = um
  modified_base 20^21: mod_base = OTHER; note = phosphorothioate linkage
  modified_base 21: mod_base = um
  source 1..21: mol_type = other RNA
aggaattccaatgatctgttt

SEQ ID NO: 483 - RNA, 21 nt, synthetic construct
  modified_base 1: mod_base = OTHER; note = 5'-cyclopropyl phosphonate-2'-O-methyluridine
  modified_base 1^2: mod_base = OTHER; note = phosphorothioate linkage
  modified_base 2: mod_base = OTHER; note = 2'-fluorouridine
  modified_base 2^3: mod_base = OTHER; note = phosphorothioate linkage
  modified_base 3: mod_base = um
  modified_base 3^4: mod_base = OTHER; note = phosphorothioate linkage
  modified_base 4: mod_base = OTHER; note = 2'-fluorocytidine
  modified_base 5: mod_base = um
  modified_base 6: mod_base = OTHER; note = 2'-fluoroguanosine
  modified_base 7: mod_base = OTHER; note = 2'-O-methyladenosine
  modified_base 8: mod_base = cm
  modified_base 9: mod_base = OTHER; note = 2'-O-methyladenosine
  modified_base 10: mod_base = gm
  modified_base 11: mod_base = OTHER; note = 2'-O-methyladenosine
  modified_base 12: mod_base = OTHER; note = 2'-fluorocytidine
  modified_base 13: mod_base = OTHER; note = 2'-O-methyladenosine
  modified_base 14: mod_base = OTHER; note = 2'-fluorouridine
  modified_base 15: mod_base = OTHER; note = 2'-O-methyladenosine
  modified_base 16: mod_base = OTHER; note = 2'-fluoroadenosine
  modified_base 17: mod_base = um
  modified_base 18: mod_base = OTHER; note = 2'-fluorocytidine
  modified_base 19: mod_base = OTHER; note = 2'-O-methyladenosine
  modified_base 20: mod_base = cm
  modified_base 20^21: mod_base = OTHER; note = phosphorothioate linkage
  modified_base 21: mod_base = OTHER; note = 2'-O-methyladenosine
  source 1..21: mol_type = other RNA
tttctgacagacataatcaca

SEQ ID NO: 484 - RNA, 21 nt, synthetic construct
  modified_base 1: mod_base = OTHER; note = 5'-cyclopropyl phosphonate-2'-O-methyladenosine
  modified_base 1^2: mod_base = OTHER; note = phosphorothioate linkage
  modified_base 2: mod_base = OTHER; note = 2'-fluoroguanosine
  modified_base 2^3: mod_base = OTHER; note = phosphorothioate linkage
  modified_base 3: mod_base = gm
  modified_base 3^4: mod_base = OTHER; note = phosphorothioate linkage
  modified_base 4: mod_base = OTHER; note = 2'-fluoroadenosine
  modified_base 5: mod_base = OTHER; note = 2'-O-methyladenosine
  modified_base 6: mod_base = um
  modified_base 7: mod_base = um
  modified_base 8: mod_base = cm
  modified_base 9: mod_base = cm
  modified_base 10: mod_base = OTHER; note = 2'-O-methyladenosine
  modified_base 11: mod_base = OTHER; note = 2'-O-methyladenosine
  modified_base 12: mod_base = OTHER; note = 2'-fluorouridine
  modified_base 13: mod_base = gm
  modified_base 14: mod_base = OTHER; note = 2'-fluoroadenosine
  modified_base 15: mod_base = um
  modified_base 16: mod_base = OTHER; note = 2'-fluorocytidine
  modified_base 17: mod_base = um
  modified_base 18: mod_base = gm
  modified_base 19: mod_base = um
  modified_base 20: mod_base = um
  modified_base 20^21: mod_base = OTHER; note = phosphorothioate linkage
  modified_base 21: mod_base = um
  source 1..21: mol_type = other RNA
aggaattccaatgatctgttt

SEQ ID NO: 485 - RNA, 21 nt, synthetic construct
  modified_base 1: mod_base = OTHER; note = 5'-cyclopropyl phosphonate-2'-O-methyladenosine
  modified_base 1^2: mod_base = OTHER; note = phosphorothioate linkage
  modified_base 2: mod_base = OTHER; note = 2'-fluoroguanosine
  modified_base 2^3: mod_base = OTHER; note = phosphorothioate linkage
  modified_base 3: mod_base = gm
  modified_base 3^4: mod_base = OTHER; note = phosphorothioate linkage
  modified_base 4: mod_base = OTHER; note = 2'-O-methyladenosine
  modified_base 5: mod_base = OTHER; note = 2'-fluoroadenosine
  modified_base 6: mod_base = um
  modified_base 7: mod_base = um
  modified_base 8: mod_base = cm
  modified_base 9: mod_base = cm
  modified_base 10: mod_base = OTHER; note = 2'-O-methyladenosine
  modified_base 11: mod_base = OTHER; note = 2'-O-methyladenosine
  modified_base 12: mod_base = OTHER; note = 2'-fluorouridine
  modified_base 13: mod_base = gm
  modified_base 14: mod_base = OTHER; note = 2'-fluoroadenosine
  modified_base 15: mod_base = um
  modified_base 16: mod_base = OTHER; note = 2'-fluorocytidine
  modified_base 17: mod_base = um
  modified_base 18: mod_base = gm
  modified_base 19: mod_base = um
  modified_base 20: mod_base = um
  modified_base 20^21: mod_base = OTHER; note = phosphorothioate linkage
  modified_base 21: mod_base = um
  source 1..21: mol_type = other RNA
aggaattccaatgatctgttt

SEQ ID NO: 486 - RNA, 21 nt, synthetic construct
  modified_base 1: mod_base = OTHER; note = 5'-cyclopropyl phosphonate-2'-O-methyladenosine
  modified_base 1^2: mod_base = OTHER; note = phosphorothioate linkage
  modified_base 2: mod_base = OTHER; note = 2'-fluoroguanosine
  modified_base 2^3: mod_base = OTHER; note = phosphorothioate linkage
  modified_base 3: mod_base = gm
  modified_base 3^4: mod_base = OTHER; note = phosphorothioate linkage
  modified_base 4: mod_base = OTHER; note = 2'-O-methyladenosine
  modified_base 5: mod_base = OTHER; note = 2'-O-methyladenosine
  modified_base 6: mod_base = um
  modified_base 7: mod_base = OTHER; note = 2'-fluorouridine
  modified_base 8: mod_base = cm
  modified_base 9: mod_base = cm
  modified_base 10: mod_base = OTHER; note = 2'-O-methyladenosine
  modified_base 11: mod_base = OTHER; note = 2'-O-methyladenosine
  modified_base 12: mod_base = OTHER; note = 2'-fluorouridine
  modified_base 13: mod_base = gm
  modified_base 14: mod_base = OTHER; note = 2'-fluoroadenosine
  modified_base 15: mod_base = um
  modified_base 16: mod_base = OTHER; note = 2'-fluorocytidine
  modified_base 17: mod_base = um
  modified_base 18: mod_base = gm
  modified_base 19: mod_base = um
  modified_base 20: mod_base = um
  modified_base 20^21: mod_base = OTHER; note = phosphorothioate linkage
  modified_base 21: mod_base = um
  source 1..21: mol_type = other RNA
aggaattccaatgatctgttt

SEQ ID NO: 487 - RNA, 21 nt, synthetic construct
  modified_base 1: mod_base = OTHER; note = 5'-cyclopropyl phosphonate-2'-O-methyladenosine
  modified_base 1^2: mod_base = OTHER; note = phosphorothioate linkage
  modified_base 2: mod_base = OTHER; note = 2'-fluoroguanosine
  modified_base 2^3: mod_base = OTHER; note = phosphorothioate linkage
  modified_base 3: mod_base = gm
  modified_base 3^4: mod_base = OTHER; note = phosphorothioate linkage
  modified_base 4: mod_base = OTHER; note = 2'-O-methyladenosine
  modified_base 5: mod_base = OTHER; note = 2'-O-methyladenosine
  modified_base 6: mod_base = um
  modified_base 7: mod_base = um
  modified_base 8: mod_base = cm
  modified_base 9: mod_base = OTHER; note = 2'-fluorocytidine
  modified_base 10: mod_base = OTHER; note = 2'-O-methyladenosine
  modified_base 11: mod_base = OTHER; note = 2'-O-methyladenosine
  modified_base 12: mod_base = OTHER; note = 2'-fluorouridine
  modified_base 13: mod_base = gm
  modified_base 14: mod_base = OTHER; note = 2'-fluoroadenosine
  modified_base 15: mod_base = um
  modified_base 16: mod_base = OTHER; note = 2'-fluorocytidine
  modified_base 17: mod_base = um
  modified_base 18: mod_base = gm
  modified_base 19: mod_base = um
  modified_base 20: mod_base = um
  modified_base 20^21: mod_base = OTHER; note = phosphorothioate linkage
  modified_base 21: mod_base = um
  source 1..21: mol_type = other RNA
aggaattccaatgatctgttt

SEQ ID NO: 488 - RNA, 21 nt, synthetic construct
  modified_base 1: mod_base = OTHER; note = 5'-cyclopropyl phosphonate-2'-O-methyladenosine
  modified_base 1^2: mod_base = OTHER; note = phosphorothioate linkage
  modified_base 2: mod_base = OTHER; note = 2'-fluoroguanosine
  modified_base 2^3: mod_base = OTHER; note = phosphorothioate linkage
  modified_base 3: mod_base = gm
  modified_base 3^4: mod_base = OTHER; note = phosphorothioate linkage
  modified_base 4: mod_base = OTHER; note = 2'-fluoroadenosine
  modified_base 5: mod_base = OTHER; note = 2'-O-methyladenosine
  modified_base 6: mod_base = OTHER; note = 2'-fluorouridine
  modified_base 7: mod_base = um
  modified_base 8: mod_base = cm
  modified_base 9: mod_base = cm
  modified_base 10: mod_base = OTHER; note = 2'-O-methyladenosine
  modified_base 11: mod_base = OTHER; note = 2'-O-methyladenosine
  modified_base 12: mod_base = um
  modified_base 13: mod_base = gm
  modified_base 14: mod_base = OTHER; note = 2'-fluoroadenosine
  modified_base 15: mod_base = um
  modified_base 16: mod_base = OTHER; note = 2'-fluorocytidine
  modified_base 17: mod_base = um
  modified_base 18: mod_base = gm
  modified_base 19: mod_base = um
  modified_base 20: mod_base = um
  modified_base 20^21: mod_base = OTHER; note = phosphorothioate linkage
  modified_base 21: mod_base = um
  source 1..21: mol_type = other RNA
aggaattccaatgatctgttt

SEQ ID NO: 489 - RNA, 21 nt, synthetic construct
  modified_base 1: mod_base = OTHER; note = 5'-cyclopropyl phosphonate-2'-O-methyladenosine
  modified_base 1^2: mod_base = OTHER; note = phosphorothioate linkage
  modified_base 2: mod_base = OTHER; note = 2'-fluoroguanosine
  modified_base 2^3: mod_base = OTHER; note = phosphorothioate linkage
  modified_base 3: mod_base = gm
  modified_base 3^4: mod_base = OTHER; note = phosphorothioate linkage
  modified_base 4: mod_base = OTHER; note = 2'-O-methyladenosine
  modified_base 5: mod_base = OTHER; note = 2'-O-methyladenosine
  modified_base 6: mod_base = um
  modified_base 7: mod_base = um
  modified_base 8: mod_base = cm
  modified_base 9: mod_base = cm
  modified_base 10: mod_base = OTHER; note = 2'-O-methyladenosine
  modified_base 11: mod_base = OTHER; note = 2'-O-methyladenosine
  modified_base 12: mod_base = um
  modified_base 13: mod_base = gm
  modified_base 14: mod_base = OTHER; note = 2'-fluoroadenosine
  modified_base 15: mod_base = um
  modified_base 16: mod_base = OTHER; note = 2'-fluorocytidine
  modified_base 17: mod_base = um
  modified_base 18: mod_base = gm
  modified_base 19: mod_base = um
  modified_base 20: mod_base = um
  modified_base 20^21: mod_base = OTHER; note = phosphorothioate linkage
  modified_base 21: mod_base = um
  source 1..21: mol_type = other RNA
aggaattccaatgatctgttt

SEQ ID NO: 490 - RNA, 21 nt, synthetic construct
  modified_base 1: mod_base = OTHER; note = 5'-cyclopropyl phosphonate-2'-O-methyladenosine
  modified_base 1^2: mod_base = OTHER; note = phosphorothioate linkage
  modified_base 2: mod_base = OTHER; note = 2'-fluoroguanosine
  modified_base 2^3: mod_base = OTHER; note = phosphorothioate linkage
  modified_base 3: mod_base = gm
  modified_base 3^4: mod_base = OTHER; note = phosphorothioate linkage
  modified_base 4: mod_base = OTHER; note = 2'-O-methyladenosine
  modified_base 5: mod_base = OTHER; note = 2'-O-methyladenosine
  modified_base 6: mod_base = um
  modified_base 7: mod_base = um
  modified_base 8: mod_base = cm
  modified_base 9: mod_base = cm
  modified_base 10: mod_base = OTHER; note = 2'-O-methyladenosine
  modified_base 11: mod_base = OTHER; note = 2'-O-methyladenosine
  modified_base 12: mod_base = OTHER; note = 2'-fluorouridine
  modified_base 13: mod_base = gm
  modified_base 14: mod_base = OTHER; note = 2'-fluoroadenosine
  modified_base 15: mod_base = um
  modified_base 16: mod_base = cm
  modified_base 17: mod_base = um
  modified_base 18: mod_base = gm
  modified_base 19: mod_base = um
  modified_base 20: mod_base = um
  modified_base 20^21: mod_base = OTHER; note = phosphorothioate linkage
  modified_base 21: mod_base = um
  source 1..21: mol_type = other RNA
aggaattccaatgatctgttt

SEQ ID NO: 491 - RNA, 21 nt, synthetic construct
  modified_base 1: mod_base = OTHER; note = 5'-cyclopropyl phosphonate-2'-O-methyladenosine
  modified_base 1^2: mod_base = OTHER; note = phosphorothioate linkage
  modified_base 2: mod_base = OTHER; note = 2'-fluoroguanosine
  modified_base 2^3: mod_base = OTHER; note = phosphorothioate linkage
  modified_base 3: mod_base = gm
  modified_base 3^4: mod_base = OTHER; note = phosphorothioate linkage
  modified_base 4: mod_base = OTHER; note = 2'-O-methyladenosine
  modified_base 5: mod_base = OTHER; note = 2'-fluoroadenosine
  modified_base 6: mod_base = um
  modified_base 7: mod_base = um
  modified_base 8: mod_base = cm
  modified_base 9: mod_base = cm
  modified_base 10: mod_base = OTHER; note = 2'-O-methyladenosine
  modified_base 11: mod_base = OTHER; note = 2'-O-methyladenosine
  modified_base 12: mod_base = um
  modified_base 13: mod_base = gm
  modified_base 14: mod_base = OTHER; note = 2'-fluoroadenosine
  modified_base 15: mod_base = um
  modified_base 16: mod_base = cm
  modified_base 17: mod_base = um
  modified_base 18: mod_base = gm
  modified_base 19: mod_base = um
  modified_base 20: mod_base = um
  modified_base 20^21: mod_base = OTHER; note = phosphorothioate linkage
  modified_base 21: mod_base = um
  source 1..21: mol_type = other RNA
aggaattccaatgatctgttt

SEQ ID NO: 492 - RNA, 21 nt, synthetic construct
  modified_base 1: mod_base = OTHER; note = 5'-cyclopropyl phosphonate-2'-O-methyladenosine
  modified_base 1^2: mod_base = OTHER; note = phosphorothioate linkage
  modified_base 2: mod_base = OTHER; note = 2'-fluoroguanosine
  modified_base 2^3: mod_base = OTHER; note = phosphorothioate linkage
  modified_base 3: mod_base = gm
  modified_base 3^4: mod_base = OTHER; note = phosphorothioate linkage
  modified_base 4: mod_base = OTHER; note = 2'-fluoroadenosine
  modified_base 5: mod_base = OTHER; note = 2'-O-methyladenosine
  modified_base 6: mod_base = um
  modified_base 7: mod_base = OTHER; note = 2',3'-seco-uridine
  modified_base 8: mod_base = cm
  modified_base 9: mod_base = cm
  modified_base 10: mod_base = OTHER; note = 2'-O-methyladenosine
  modified_base 11: mod_base = OTHER; note = 2'-O-methyladenosine
  modified_base 12: mod_base = OTHER; note = 2'-fluorouridine
  modified_base 13: mod_base = gm
  modified_base 14: mod_base = OTHER; note = 2'-fluoroadenosine
  modified_base 15: mod_base = um
  modified_base 16: mod_base = OTHER; note = 2'-fluorocytidine
  modified_base 17: mod_base = um
  modified_base 18: mod_base = gm
  modified_base 19: mod_base = um
  modified_base 20: mod_base = um
  modified_base 20^21: mod_base = OTHER; note = phosphorothioate linkage
  modified_base 21: mod_base = um
  source 1..21: mol_type = other RNA
aggaattccaatgatctgttt

SEQ ID NO: 493 - RNA, 21 nt, synthetic construct
  modified_base 1: mod_base = OTHER; note = 5'-cyclopropyl phosphonate-2'-O-methyluridine
  modified_base 1^2: mod_base = OTHER; note = phosphorothioate linkage
  modified_base 2: mod_base = OTHER; note = 2'-fluoroguanosine
  modified_base 2^3: mod_base = OTHER; note = phosphorothioate linkage
  modified_base 3: mod_base = um
  modified_base 3^4: mod_base = OTHER; note = phosphorothioate linkage
  modified_base 4: mod_base = OTHER; note = 2'-fluoroadenosine
  modified_base 5: mod_base = OTHER; note = 2'-O-methyladenosine
  modified_base 6: mod_base = OTHER; note = 2'-fluoroadenosine
  modified_base 7: mod_base = OTHER; note = 2'-O-methyladenosine
  modified_base 8: mod_base = gm
  modified_base 9: mod_base = cm
  modified_base 10: mod_base = OTHER; note = 2'-O-methyladenosine
  modified_base 11: mod_base = gm
  modified_base 12: mod_base = OTHER; note = 2'-fluoroadenosine
  modified_base 13: mod_base = OTHER; note = 2'-O-methyladenosine
  modified_base 14: mod_base = OTHER; note = 2'-fluorocytidine
  modified_base 15: mod_base = cm
  modified_base 16: mod_base = OTHER; note = 2'-fluorouridine
  modified_base 17: mod_base = gm
  modified_base 18: mod_base = OTHER; note = 2'-fluoroadenosine
  modified_base 19: mod_base = gm
  modified_base 20: mod_base = cm
  modified_base 20^21: mod_base = OTHER; note = phosphorothioate linkage
  modified_base 21: mod_base = gm
  source 1..21: mol_type = other RNA
tgtaaaagcagaacctgagcg

SEQ ID NO: 494 - RNA, 21 nt, synthetic construct
  modified_base 1: mod_base = OTHER; note = 5'-cyclopropyl phosphonate-2'-O-methyluridine
  modified_base 1^2: mod_base = OTHER; note = phosphorothioate linkage
  modified_base 2: mod_base = OTHER; note = 2'-fluorouridine
  modified_base 2^3: mod_base = OTHER; note = phosphorothioate linkage
  modified_base 3: mod_base = cm
  modified_base 3^4: mod_base = OTHER; note = phosphorothioate linkage
  modified_base 4: mod_base = OTHER; note = 2'-fluoroadenosine
  modified_base 5: mod_base = um
  modified_base 6: mod_base = OTHER; note = 2'-fluorocytidine
  modified_base 7: mod_base = OTHER; note = 2'-O-methyladenosine
  modified_base 8: mod_base = gm
  modified_base 9: mod_base = cm
  modified_base 10: mod_base = um
  modified_base 11: mod_base = um
  modified_base 12: mod_base = OTHER; note = 2'-fluorouridine
  modified_base 13: mod_base = um
  modified_base 14: mod_base = OTHER; note = 2'-fluorocytidine
  modified_base 15: mod_base = cm
  modified_base 16: mod_base = OTHER; note = 2'-fluoroadenosine
  modified_base 17: mod_base = gm
  modified_base 18: mod_base = OTHER; note = 2'-fluoroguanosine
  modified_base 19: mod_base = gm
  modified_base 20: mod_base = um
  modified_base 20^21: mod_base = OTHER; note = phosphorothioate linkage
  modified_base 21: mod_base = cm
  source 1..21: mol_type = other RNA
ttcatcagcttttccagggtc

SEQ ID NO: 495 - RNA, 21 nt, synthetic construct
  modified_base 1: mod_base = OTHER; note = 5'-cyclopropyl phosphonate-2'-O-methyladenosine
  modified_base 1^2: mod_base = OTHER; note = phosphorothioate linkage
  modified_base 2: mod_base = OTHER; note = 2'-fluoroguanosine
  modified_base 2^3: mod_base = OTHER; note = phosphorothioate linkage
  modified_base 3: mod_base = gm
  modified_base 3^4: mod_base = OTHER; note = phosphorothioate linkage
  modified_base 4: mod_base = OTHER; note = 2'-fluorocytidine
  modified_base 5: mod_base = cm
  modified_base 6: mod_base = OTHER; note = 2'-fluorouridine
  modified_base 7: mod_base = um
  modified_base 8: mod_base = cm
  modified_base 9: mod_base = OTHER; note = 2'-O-methyladenosine
  modified_base 10: mod_base = um
  modified_base 11: mod_base = cm
  modified_base 12: mod_base = OTHER; note = 2'-fluoroadenosine
  modified_base 13: mod_base = gm
  modified_base 14: mod_base = OTHER; note = 2'-fluorocytidine
  modified_base 15: mod_base = um
  modified_base 16: mod_base = OTHER; note = 2'-fluorouridine
  modified_base 17: mod_base = um
  modified_base 18: mod_base = OTHER; note = 2'-fluorouridine
  modified_base 19: mod_base = cm
  modified_base 20: mod_base = cm
  modified_base 20^21: mod_base = OTHER; note = phosphorothioate linkage
  modified_base 21: mod_base = OTHER; note = 2'-O-methyladenosine
  source 1..21: mol_type = other RNA
aggccttcatcagcttttcca

SEQ ID NO: 496 - RNA, 21 nt, synthetic construct
  modified_base 1: mod_base = OTHER; note = 5'-cyclopropyl phosphonate-2'-O-methyluridine
  modified_base 1^2: mod_base = OTHER; note = phosphorothioate linkage
  modified_base 2: mod_base = OTHER; note = 2'-fluoroguanosine
  modified_base 2^3: mod_base = OTHER; note = phosphorothioate linkage
  modified_base 3: mod_base = OTHER; note = 2'-O-methyladenosine
  modified_base 3^4: mod_base = OTHER; note = phosphorothioate linkage
  modified_base 4: mod_base = OTHER; note = 2'-fluorocytidine
  modified_base 5: mod_base = um
  modified_base 6: mod_base = OTHER; note = 2'-fluorocytidine
  modified_base 7: mod_base = gm
  modified_base 8: mod_base = OTHER; note = 2'-O-methyladenosine
  modified_base 9: mod_base = OTHER; note = 2'-O-methyladenosine
  modified_base 10: mod_base = gm
  modified_base 11: mod_base = gm
  modified_base 12: mod_base = OTHER; note = 2'-fluorocytidine
  modified_base 13: mod_base = cm
  modified_base 14: mod_base = OTHER; note = 2'-fluorouridine
  modified_base 15: mod_base = um
  modified_base 16: mod_base = OTHER; note = 2'-fluorocytidine
  modified_base 17: mod_base = OTHER; note = 2'-O-methyladenosine
  modified_base 18: mod_base = OTHER; note = 2'-fluorouridine
  modified_base 19: mod_base = cm
  modified_base 20: mod_base = OTHER; note = 2'-O-methyladenosine
  modified_base 20^21: mod_base = OTHER; note = phosphorothioate linkage
  modified_base 21: mod_base = gm
  source 1..21: mol_type = other RNA
tgactcgaaggccttcatcag

SEQ ID NO: 497 - RNA, 21 nt, synthetic construct
  modified_base 1: mod_base = OTHER; note = 5'-cyclopropyl phosphonate-2'-O-methyluridine
  modified_base 1^2: mod_base = OTHER; note = phosphorothioate linkage
  modified_base 2: mod_base = OTHER; note = 2'-fluoroadenosine
  modified_base 2^3: mod_base = OTHER; note = phosphorothioate linkage
  modified_base 3: mod_base = cm
  modified_base 3^4: mod_base = OTHER; note = phosphorothioate linkage
  modified_base 4: mod_base = OTHER; note = 2'-fluorouridine
  modified_base 5: mod_base = um
  modified_base 6: mod_base = OTHER; note = 2'-fluoroguanosine
  modified_base 7: mod_base = OTHER; note = 2'-O-methyladenosine
  modified_base 8: mod_base = gm
  modified_base 9: mod_base = gm
  modified_base 10: mod_base = gm
  modified_base 11: mod_base = OTHER; note = 2'-O-methyladenosine
  modified_base 12: mod_base = OTHER; note = 2'-fluorocytidine
  modified_base 13: mod_base = um
  modified_base 14: mod_base = OTHER; note = 2'-fluorocytidine
  modified_base 15: mod_base = gm
  modified_base 16: mod_base = OTHER; note = 2'-fluoroadenosine
  modified_base 17: mod_base = OTHER; note = 2'-O-methyladenosine
  modified_base 18: mod_base = OTHER; note = 2'-fluoroguanosine
  modified_base 19: mod_base = gm
  modified_base 20: mod_base = cm
  modified_base 20^21: mod_base = OTHER; note = phosphorothioate linkage
  modified_base 21: mod_base = cm
  source 1..21: mol_type = other RNA
tacttgagggactcgaaggcc

SEQ ID NO: 498 - RNA, 21 nt, synthetic construct
  modified_base 1: mod_base = OTHER; note = 5'-cyclopropyl phosphonate-2'-O-methyluridine
  modified_base 1^2: mod_base = OTHER; note = phosphorothioate linkage
  modified_base 2: mod_base = OTHER; note = 2'-fluoroguanosine
  modified_base 2^3: mod_base = OTHER; note = phosphorothioate linkage
  modified_base 3: mod_base = OTHER; note = 2'-O-methyladenosine
  modified_base 3^4: mod_base = OTHER; note = phosphorothioate linkage
  modified_base 4: mod_base = OTHER; note = 2'-fluorocytidine
  modified_base 5: mod_base = um
  modified_base 6: mod_base = OTHER; note = 2'-fluorouridine
  modified_base 7: mod_base = gm
  modified_base 8: mod_base = OTHER; note = 2'-O-methyladenosine
  modified_base 9: mod_base = gm
  modified_base 10: mod_base = gm
  modified_base 11: mod_base = gm
  modified_base 12: mod_base = OTHER; note = 2'-fluoroadenosine
  modified_base 13: mod_base = cm
  modified_base 14: mod_base = OTHER; note = 2'-fluorouridine
  modified_base 15: mod_base = cm
  modified_base 16: mod_base = OTHER; note = 2'-fluoroguanosine
  modified_base 17: mod_base = OTHER; note = 2'-O-methyladenosine
  modified_base 18: mod_base = OTHER; note = 2'-fluoroadenosine
  modified_base 19: mod_base = gm
  modified_base 20: mod_base = gm
  modified_base 20^21: mod_base = OTHER; note = phosphorothioate linkage
  modified_base 21: mod_base = cm
  source 1..21: mol_type = other RNA
tgacttgagggactcgaaggc

SEQ ID NO: 499 - RNA, 21 nt, synthetic construct
  modified_base 1: mod_base = OTHER; note = 5'-cyclopropyl phosphonate-2'-O-methyladenosine
  modified_base 1^2: mod_base = OTHER; note = phosphorothioate linkage
  modified_base 2: mod_base = OTHER; note = 2'-fluoroguanosine
  modified_base 2^3: mod_base = OTHER; note = phosphorothioate linkage
  modified_base 3: mod_base = OTHER; note = 2'-O-methyladenosine
  modified_base 3^4: mod_base = OTHER; note = phosphorothioate linkage
  modified_base 4: mod_base = OTHER; note = 2'-fluoroadenosine
  modified_base 5: mod_base = OTHER; note = 2'-O-methyladenosine
  modified_base 6: mod_base = OTHER; note = 2'-fluoroadenosine
  modified_base 7: mod_base = OTHER; note = 2'-O-methyladenosine
  modified_base 8: mod_base = gm
  modified_base 9: mod_base = um
  modified_base 10: mod_base = um
  modified_base 11: mod_base = cm
  modified_base 12: mod_base = OTHER; note = 2'-fluorocytidine
  modified_base 13: mod_base = OTHER; note = 2'-O-methyladenosine
  modified_base 14: mod_base = OTHER; note = 2'-fluorouridine
  modified_base 15: mod_base = OTHER; note = 2'-O-methyladenosine
  modified_base 16: mod_base = OTHER; note = 2'-fluoroguanosine
  modified_base 17: mod_base = cm
  modified_base 18: mod_base = OTHER; note = 2'-fluoroguanosine
  modified_base 19: mod_base = OTHER; note = 2'-O-methyladenosine
  modified_base 20: mod_base = um
  modified_base 20^21: mod_base = OTHER; note = phosphorothioate linkage
  modified_base 21: mod_base = gm
  source 1..21: mol_type = other RNA
agaaaaagttccatagcgatg

SEQ ID NO: 500 - RNA, 21 nt, synthetic construct
  modified_base 1: mod_base = OTHER; note = 5'-cyclopropyl phosphonate-2'-O-methyladenosine
  modified_base 1^2: mod_base = OTHER; note = phosphorothioate linkage
  modified_base 2: mod_base = OTHER; note = 2'-fluoroadenosine
  modified_base 2^3: mod_base = OTHER; note = phosphorothioate linkage
  modified_base 3: mod_base = gm
  modified_base 3^4: mod_base = OTHER; note = phosphorothioate linkage
  modified_base 4: mod_base = OTHER; note = 2'-fluoroadenosine
  modified_base 5: mod_base = um
  modified_base 6: mod_base = OTHER; note = 2'-fluorouridine
  modified_base 7: mod_base = OTHER; note = 2'-O-methyladenosine
  modified_base 8: mod_base = gm
  modified_base 9: mod_base = OTHER; note = 2'-O-methyladenosine
  modified_base 10: mod_base = OTHER; note = 2'-O-methyladenosine
  modified_base 11: mod_base = um
  modified_base 12: mod_base = OTHER; note = 2'-fluorocytidine
  modified_base 13: mod_base = cm
  modified_base 14: mod_base = OTHER; note = 2'-fluoroadenosine
  modified_base 15: mod_base = um
  modified_base 16: mod_base = OTHER; note = 2'-fluorocytidine
  modified_base 17: mod_base = OTHER; note = 2'-O-methyladenosine
  modified_base 18: mod_base = OTHER; note = 2'-fluoroadenosine
  modified_base 19: mod_base = OTHER; note = 2'-O-methyladenosine
  modified_base 20: mod_base = gm
  modified_base 20^21: mod_base = OTHER; note = phosphorothioate linkage
  modified_base 21: mod_base = cm
  source 1..21: mol_type = other RNA
aagattagaatccatcaaagc

SEQ ID NO: 501 - RNA, 21 nt, synthetic construct
  modified_base 1: mod_base = OTHER; note = 5'-cyclopropyl phosphonate-2'-O-methyluridine
  modified_base 1^2: mod_base = OTHER; note = phosphorothioate linkage
  modified_base 2: mod_base = OTHER; note = 2'-fluorouridine
  modified_base 2^3: mod_base = OTHER; note = phosphorothioate linkage
  modified_base 3: mod_base = um
  modified_base 3^4: mod_base = OTHER; note = phosphorothioate linkage
  modified_base 4: mod_base = OTHER; note = 2'-fluoroguanosine
  modified_base 5: mod_base = gm
  modified_base 6: mod_base = OTHER; note = 2'-fluoroadenosine
  modified_base 7: mod_base = OTHER; note = 2'-O-methyladenosine
  modified_base 8: mod_base = gm
  modified_base 9: mod_base = OTHER; note = 2'-O-methyladenosine
  modified_base 10: mod_base = um
  modified_base 11: mod_base = um
  modified_base 12: mod_base = OTHER; note = 2'-fluoroadenosine
  modified_base 13: mod_base = gm
  modified_base 14: mod_base = OTHER; note = 2'-fluoroadenosine
  modified_base 15: mod_base = OTHER; note = 2'-O-methyladenosine
  modified_base 16: mod_base = OTHER; note = 2'-fluorouridine
  modified_base 17: mod_base = cm
  modified_base 18: mod_base = OTHER; note = 2'-fluorocytidine
  modified_base 19: mod_base = OTHER; note = 2'-O-methyladenosine
  modified_base 20: mod_base = um
  modified_base 20^21: mod_base = OTHER; note = phosphorothioate linkage
  modified_base 21: mod_base = cm
  source 1..21: mol_type = other RNA
tttggaagattagaatccatc

SEQ ID NO: 502 - RNA, 21 nt, synthetic construct
  modified_base 1: mod_base = OTHER; note = 5'-cyclopropyl phosphonate-2'-O-methyluridine
  modified_base 1^2: mod_base = OTHER; note = phosphorothioate linkage
  modified_base 2: mod_base = OTHER; note = 2'-fluorouridine
  modified_base 2^3: mod_base = OTHER; note = phosphorothioate linkage
  modified_base 3: mod_base = gm
  modified_base 3^4: mod_base = OTHER; note = phosphorothioate linkage
  modified_base 4: mod_base = OTHER; note = 2'-fluorouridine
  modified_base 5: mod_base = cm
  modified_base 6: mod_base = OTHER; note = 2'-fluoroadenosine
  modified_base 7: mod_base = um
  modified_base 8: mod_base = um
  modified_base 9: mod_base = um
  modified_base 10: mod_base = gm
  modified_base 11: mod_base = cm
  modified_base 12: mod_base = OTHER; note = 2'-fluoroadenosine
  modified_base 13: mod_base = OTHER; note = 2'-O-methyladenosine
  modified_base 14: mod_base = OTHER; note = 2'-fluoroadenosine
  modified_base 15: mod_base = OTHER; note = 2'-O-methyladenosine
  modified_base 16: mod_base = OTHER; note = 2'-fluorouridine
  modified_base 17: mod_base = um
  modified_base 18: mod_base = OTHER; note = 2'-fluoroguanosine
  modified_base 19: mod_base = cm
  modified_base 20: mod_base = cm
  modified_base 20^21: mod_base = OTHER; note = phosphorothioate linkage
  modified_base 21: mod_base = OTHER; note = 2'-O-methyladenosine
  source 1..21: mol_type = other RNA
ttgtcatttgcaaaattgcca

SEQ ID NO: 503 - RNA, 21 nt, synthetic construct
  modified_base 1: mod_base = OTHER; note = 5'-cyclopropyl phosphonate-2'-O-methyluridine
  modified_base 1^2: mod_base = OTHER; note = phosphorothioate linkage
  modified_base 2: mod_base = OTHER; note = 2'-fluorouridine
  modified_base 2^3: mod_base = OTHER; note = phosphorothioate linkage
  modified_base 3: mod_base = gm
  modified_base 3^4: mod_base = OTHER; note = phosphorothioate linkage
  modified_base 4: mod_base = OTHER; note = 2'-fluorouridine
  modified_base 5: mod_base = gm
  modified_base 6: mod_base = OTHER; note = 2'-fluorouridine
  modified_base 7: mod_base = OTHER; note = 2'-O-methyladenosine
  modified_base 8: mod_base = um
  modified_base 9: mod_base = gm
  modified_base 10: mod_base = OTHER; note = 2'-O-methyladenosine
  modified_base 11: mod_base = um
  modified_base 12: mod_base = OTHER; note = 2'-fluoroguanosine
  modified_base 13: mod_base = um
  modified_base 14: mod_base = OTHER; note = 2'-fluoroadenosine
  modified_base 15: mod_base = OTHER; note = 2'-O-methyladenosine
  modified_base 16: mod_base = OTHER; note = 2'-fluorocytidine
  modified_base 17: mod_base = gm
  modified_base 18: mod_base = OTHER; note = 2'-fluorouridine
  modified_base 19: mod_base = cm
  modified_base 20: mod_base = OTHER; note = 2'-O-methyladenosine
  modified_base 20^21: mod_base = OTHER; note = phosphorothioate linkage
  modified_base 21: mod_base = gm
  source 1..21: mol_type = other RNA
ttgtgtatgatgtaacgtcag

SEQ ID NO: 504 - RNA, 21 nt, synthetic construct
  modified_base 1: mod_base = OTHER; note = 5'-cyclopropyl phosphonate-2'-O-methyladenosine
  modified_base 1^2: mod_base = OTHER; note = phosphorothioate linkage
  modified_base 2: mod_base = OTHER; note = 2'-fluorocytidine
  modified_base 2^3: mod_base = OTHER; note = phosphorothioate linkage
  modified_base 3: mod_base = OTHER; note = 2'-O-methyladenosine
  modified_base 3^4: mod_base = OTHER; note = phosphorothioate linkage
  modified_base 4: mod_base = OTHER; note = 2'-fluoroadenosine
  modified_base 5: mod_base = cm
  modified_base 6: mod_base = OTHER; note = 2'-fluoroadenosine
  modified_base 7: mod_base = um
  modified_base 8: mod_base = um
  modified_base 9: mod_base = gm
  modified_base 10: mod_base = um
  modified_base 11: mod_base = gm
  modified_base 12: mod_base = OTHER; note = 2'-fluoroguanosine
  modified_base 13: mod_base = um
  modified_base 14: mod_base = OTHER; note = 2'-fluorocytidine
  modified_base 15: mod_base = um
  modified_base 16: mod_base = OTHER; note = 2'-fluorouridine
  modified_base 17: mod_base = gm
  modified_base 18: mod_base = OTHER; note = 2'-fluoroguanosine
  modified_base 19: mod_base = um
  modified_base 20: mod_base = gm
  modified_base 20^21: mod_base = OTHER; note = phosphorothioate linkage
  modified_base 21: mod_base = cm
  source 1..21: mol_type = other RNA
acaacattgtggtcttggtgc

SEQ ID NO: 505 - RNA, 21 nt, synthetic construct
  modified_base 1: mod_base = OTHER; note = 5'-cyclopropyl phosphonate-2'-O-methyluridine
  modified_base 1^2: mod_base = OTHER; note = phosphorothioate linkage
  modified_base 2: mod_base = OTHER; note = 2'-fluorocytidine
  modified_base 2^3: mod_base = OTHER; note = phosphorothioate linkage
  modified_base 3: mod_base = um
  modified_base 3^4: mod_base = OTHER; note = phosphorothioate linkage
  modified_base 4: mod_base = OTHER; note = 2'-fluoroadenosine
  modified_base 5: mod_base = um
  modified_base 6: mod_base = OTHER; note = 2'-fluoroadenosine
  modified_base 7: mod_base = OTHER; note = 2'-O-methyladenosine
  modified_base 8: mod_base = gm
  modified_base 9: mod_base = um
  modified_base 10: mod_base = um
  modified_base 11: mod_base = cm
  modified_base 12: mod_base = OTHER; note = 2'-fluorocytidine
  modified_base 13: mod_base = OTHER; note = 2'-O-methyladenosine
  modified_base 14: mod_base = OTHER; note = 2'-fluorocytidine
  modified_base 15: mod_base = OTHER; note = 2'-O-methyladenosine
  modified_base 16: mod_base = OTHER; note = 2'-fluoroadenosine
  modified_base 17: mod_base = um
  modified_base 18: mod_base = OTHER; note = 2'-fluoroadenosine
  modified_base 19: mod_base = cm
  modified_base 20: mod_base = um
  modified_base 20^21: mod_base = OTHER; note = phosphorothioate linkage
  modified_base 21: mod_base = cm
  source 1..21: mol_type = other RNA
tctataagttccacaatactc

SEQ ID NO: 506 - RNA, 21 nt, synthetic construct
  modified_base 1: mod_base = OTHER; note = 5'-cyclopropyl phosphonate-2'-O-methyluridine
  modified_base 1^2: mod_base = OTHER; note = phosphorothioate linkage
  modified_base 2: mod_base = OTHER; note = 2'-fluorocytidine
  modified_base 2^3: mod_base = OTHER; note = phosphorothioate linkage
  modified_base 3: mod_base = OTHER; note = 2'-O-methyladenosine
  modified_base 3^4: mod_base = OTHER; note = phosphorothioate linkage
  modified_base 4: mod_base = OTHER; note = 2'-fluorouridine
  modified_base 5: mod_base = gm
  modified_base 6: mod_base = OTHER; note = 2'-fluoroadenosine
  modified_base 7: mod_base = um
  modified_base 8: mod_base = cm
  modified_base 9: mod_base = gm
  modified_base 10: mod_base = OTHER; note = 2'-O-methyladenosine
  modified_base 11: mod_base = um
  modified_base 12: mod_base = OTHER; note = 2'-fluoroguanosine
  modified_base 13: mod_base = um
  modified_base 14: mod_base = OTHER; note = 2'-fluoroadenosine
  modified_base 15: mod_base = gm
  modified_base 16: mod_base = OTHER; note = 2'-fluorouridine
  modified_base 17: mod_base = um
  modified_base 18: mod_base = OTHER; note = 2'-fluorocytidine
  modified_base 19: mod_base = OTHER; note = 2'-O-methyladenosine
  modified_base 20: mod_base = OTHER; note = 2'-O-methyladenosine
  modified_base 20^21: mod_base = OTHER; note = phosphorothioate linkage
  modified_base 21: mod_base = gm
  source 1..21: mol_type = other RNA
tcatgatcgatgtagttcaag

SEQ ID NO: 507 - RNA, 21 nt, synthetic construct
  modified_base 1: mod_base = OTHER; note = 5'-cyclopropyl phosphonate-2'-O-methyluridine
  modified_base 1^2: mod_base = OTHER; note = phosphorothioate linkage
  modified_base 2: mod_base = OTHER; note = 2'-fluoroadenosine
  modified_base 2^3: mod_base = OTHER; note = phosphorothioate linkage
  modified_base 3: mod_base = cm
  modified_base 3^4: mod_base = OTHER; note = phosphorothioate linkage
  modified_base 4: mod_base = OTHER; note = 2'-fluoroadenosine
  modified_base 5: mod_base = OTHER; note = 2'-O-methyladenosine
  modified_base 6: mod_base = OTHER; note = 2'-fluoroadenosine
  modified_base 7: mod_base = gm
  modified_base 8: mod_base = cm
  modified_base 9: mod_base = um
  modified_base 10: mod_base = um
  modified_base 11: mod_base = cm
  modified_base 12: mod_base = OTHER; note = 2'-fluoroadenosine
  modified_base 13: mod_base = cm
  modified_base 14: mod_base = OTHER; note = 2'-fluoroadenosine
  modified_base 15: mod_base = gm
  modified_base 16: mod_base = OTHER; note = 2'-fluorocytidine
  modified_base 17: mod_base = OTHER; note = 2'-O-methyladenosine
  modified_base 18: mod_base = OTHER; note = 2'-fluorouridine
  modified_base 19: mod_base = cm
  modified_base 20: mod_base = cm
  modified_base 20^21: mod_base = OTHER; note = phosphorothioate linkage
  modified_base 21: mod_base = OTHER; note = 2'-O-methyladenosine
  source 1..21: mol_type = other RNA
tacaaagcttcacagcatcca

SEQ ID NO: 508 - RNA, 21 nt, synthetic construct
  modified_base 1: mod_base = OTHER; note = 5'-cyclopropyl phosphonate-2'-O-methyluridine
  modified_base 1^2: mod_base = OTHER; note = phosphorothioate linkage
  modified_base 2: mod_base = OTHER; note = 2'-fluoroadenosine
  modified_base 2^3: mod_base = OTHER; note = phosphorothioate linkage
  modified_base 3: mod_base = cm
  modified_base 3^4: mod_base = OTHER; note = phosphorothioate linkage
  modified_base 4: mod_base = OTHER; note = 2'-fluorouridine
  modified_base 5: mod_base = um
  modified_base 6: mod_base = OTHER; note = 2'-fluoroguanosine
  modified_base 7: mod_base = um
  modified_base 8: mod_base = um
  modified_base 9: mod_base = gm
  modified_base 10: mod_base = um
  modified_base 11: mod_base = OTHER; note = 2'-O-methyladenosine
  modified_base 12: mod_base = OTHER; note = 2'-fluoroadenosine
  modified_base 13: mod_base = cm
  modified_base 14: mod_base = OTHER; note = 2'-fluoroadenosine
  modified_base 15: mod_base = gm
  modified_base 16: mod_base = OTHER; note = 2'-fluoroguanosine
  modified_base 17: mod_base = OTHER; note = 2'-O-methyladenosine
  modified_base 18: mod_base = OTHER; note = 2'-fluorocytidine
  modified_base 19: mod_base = cm
  modified_base 20: mod_base = um
  modified_base 20^21: mod_base = OTHER; note = phosphorothioate linkage
  modified_base 21: mod_base = gm
  source 1..21: mol_type = other RNA
tacttgttgtaacaggacctg

SEQ ID NO: 509 - RNA, 21 nt, synthetic construct
  modified_base 1: mod_base = OTHER; note = 5'-cyclopropyl phosphonate-2'-O-methyluridine
  modified_base 1^2: mod_base = OTHER; note = phosphorothioate linkage
  modified_base 2: mod_base = OTHER; note = 2'-fluorouridine
  modified_base 2^3: mod_base = OTHER; note = phosphorothioate linkage
  modified_base 3: mod_base = gm
  modified_base 3^4: mod_base = OTHER; note = phosphorothioate linkage
  modified_base 4: mod_base = OTHER; note = 2'-fluoroadenosine
  modified_base 5: mod_base = um
  modified_base 6: mod_base = OTHER; note = 2'-fluoroguanosine
  modified_base 7: mod_base = OTHER; note = 2'-O-methyladenosine
  modified_base 8: mod_base = gm
  modified_base 9: mod_base = gm
  modified_base 10: mod_base = OTHER; note = 2'-O-methyladenosine
  modified_base 11: mod_base = um
  modified_base 12: mod_base = OTHER; note = 2'-fluorouridine
  modified_base 13: mod_base = um
  modified_base 14: mod_base = OTHER; note = 2'-fluoroadenosine
  modified_base 15: mod_base = cm
  modified_base 16: mod_base = OTHER; note = 2'-fluorouridine
  modified_base 17: mod_base = um
  modified_base 18: mod_base = OTHER; note = 2'-fluoroguanosine
  modified_base 19: mod_base = um
  modified_base 20: mod_base = um
  modified_base 20^21: mod_base = OTHER; note = phosphorothioate linkage
  modified_base 21: mod_base = gm
  source 1..21: mol_type = other RNA
ttgatgaggatttacttgttg

SEQ ID NO: 510 - RNA, 21 nt, synthetic construct
  modified_base 1: mod_base = OTHER; note = 5'-cyclopropyl phosphonate-2'-O-methyladenosine
  modified_base 1^2: mod_base = OTHER; note = phosphorothioate linkage
  modified_base 2: mod_base = OTHER; note = 2'-fluorocytidine
  modified_base 2^3: mod_base = OTHER; note = phosphorothioate linkage
  modified_base 3: mod_base = OTHER; note = 2'-O-methyladenosine
  modified_base 3^4: mod_base = OTHER; note = phosphorothioate linkage
  modified_base 4: mod_base = OTHER; note = 2'-fluoroadenosine
  modified_base 5: mod_base = OTHER; note = 2'-O-methyladenosine
  modified_base 6: mod_base = OTHER; note = 2'-fluorocytidine
  modified_base 7: mod_base = OTHER; note = 2'-O-methyladenosine
  modified_base 8: mod_base = gm
  modified_base 9: mod_base = um
  modified_base 10: mod_base = um
  modified_base 11: mod_base = gm
  modified_base 12: mod_base = OTHER; note = 2'-fluorocytidine
  modified_base 13: mod_base = cm
  modified_base 14: mod_base = OTHER; note = 2'-fluoroadenosine
  modified_base 15: mod_base = um
  modified_base 16: mod_base = OTHER; note = 2'-fluorocytidine
  modified_base 17: mod_base = OTHER; note = 2'-O-methyladenosine
  modified_base 18: mod_base = OTHER; note = 2'-fluorouridine
  modified_base 19: mod_base = um
  modified_base 20: mod_base = gm
  modified_base 20^21: mod_base = OTHER; note = phosphorothioate linkage
  modified_base 21: mod_base = gm
  source 1..21: mol_type = other RNA
acaaacagttgccatcattgg

SEQ ID NO: 511 - RNA, 21 nt, synthetic construct
  modified_base 1: mod_base = OTHER; note = 5'-cyclopropyl phosphonate-2'-O-methyluridine
  modified_base 1^2: mod_base = OTHER; note = phosphorothioate linkage
  modified_base 2: mod_base = OTHER; note = 2'-fluoroadenosine
  modified_base 2^3: mod_base = OTHER; note = phosphorothioate linkage
  modified_base 3: mod_base = cm
  modified_base 3^4: mod_base = OTHER; note = phosphorothioate linkage
  modified_base 4: mod_base = OTHER; note = 2'-fluoroadenosine
  modified_base 5: mod_base = OTHER; note = 2'-O-methyladenosine
  modified_base 6: mod_base = OTHER; note = 2'-fluoroadenosine
  modified_base 7: mod_base = gm
  modified_base 8: mod_base = cm
  modified_base 9: mod_base = cm
  modified_base 10: mod_base = OTHER; note = 2'-O-methyladenosine
  modified_base 11: mod_base = OTHER; note = 2'-O-methyladenosine
  modified_base 12: mod_base = OTHER; note = 2'-fluorouridine
  modified_base 13: mod_base = OTHER; note = 2'-O-methyladenosine
  modified_base 14: mod_base = OTHER; note = 2'-fluoroadenosine
  modified_base 15: mod_base = OTHER; note = 2'-O-methyladenosine
  modified_base 16: mod_base = OTHER; note = 2'-fluorocytidine
  modified_base 17: mod_base = OTHER; note = 2'-O-methyladenosine
  modified_base 18: mod_base = OTHER; note = 2'-fluorocytidine
  modified_base 19: mod_base = cm
  modified_base 20: mod_base = um
  modified_base 20^21: mod_base = OTHER; note = phosphorothioate linkage
  modified_base 21: mod_base = gm
  source 1..21: mol_type = other RNA
tacaaagccaataaacacctg

SEQ ID NO: 512 - RNA, 21 nt, synthetic construct
  modified_base 1: mod_base = OTHER; note = 5'-cyclopropyl phosphonate-2'-O-methyluridine
  modified_base 1^2: mod_base = OTHER; note = phosphorothioate linkage
  modified_base 2: mod_base = OTHER; note = 2'-fluoroadenosine
  modified_base 2^3: mod_base = OTHER; note = phosphorothioate linkage
  modified_base 3: mod_base = um
  modified_base 3^4: mod_base = OTHER; note = phosphorothioate linkage
  modified_base 4: mod_base = OTHER; note = 2'-fluorocytidine
  modified_base 5: mod_base = um
  modified_base 6: mod_base = OTHER; note = 2'-fluoroguanosine
  modified_base 7: mod_base = um
  modified_base 8: mod_base = cm
  modified_base 9: mod_base = gm
  modified_base 10: mod_base = OTHER; note = 2'-O-methyladenosine
  modified_base 11: mod_base = gm
  modified_base 12: mod_base = OTHER; note = 2'-fluoroadenosine
  modified_base 13: mod_base = cm
  modified_base 14: mod_base = OTHER; note = 2'-fluoroadenosine
  modified_base 15: mod_base = gm
  modified_base 16: mod_base = OTHER; note = 2'-fluorouridine
  modified_base 17: mod_base = cm
  modified_base 18: mod_base = OTHER; note = 2'-fluoroguanosine
  modified_base 19: mod_base = cm
  modified_base 20: mod_base = um
  modified_base 20^21: mod_base = OTHER; note = phosphorothioate linkage
  modified_base 21: mod_base = um
  source 1..21: mol_type = other RNA
tatctgtcgagacagtcgctt

SEQ ID NO: 513 - RNA, 21 nt, synthetic construct
  modified_base 1: mod_base = OTHER; note = 5'-cyclopropyl phosphonate-2'-O-methyluridine
  modified_base 1^2: mod_base = OTHER; note = phosphorothioate linkage
  modified_base 2: mod_base = OTHER; note = 2'-fluoroadenosine
  modified_base 2^3: mod_base = OTHER; note = phosphorothioate linkage
  modified_base 3: mod_base = gm
  modified_base 3^4: mod_base = OTHER; note = phosphorothioate linkage
  modified_base 4: mod_base = OTHER; note = 2'-fluorouridine
  modified_base 5: mod_base = um
  modified_base 6: mod_base = OTHER; note = 2'-fluoroguanosine
  modified_base 7: mod_base = OTHER; note = 2'-O-methyladenosine
  modified_base 8: mod_base = OTHER; note = 2'-O-methyladenosine
  modified_base 9: mod_base = cm
  modified_base 10: mod_base = OTHER; note = 2'-O-methyladenosine
  modified_base 11: mod_base = gm
  modified_base 12: mod_base = OTHER; note = 2'-fluorouridine
  modified_base 13: mod_base = gm
  modified_base 14: mod_base = OTHER; note = 2'-fluorocytidine
  modified_base 15: mod_base = um
  modified_base 16: mod_base = OTHER; note = 2'-fluorocytidine
  modified_base 17: mod_base = OTHER; note = 2'-O-methyladenosine
  modified_base 18: mod_base = OTHER; note = 2'-fluorocytidine
  modified_base 19: mod_base = gm
  modified_base 20: mod_base = gm
  modified_base 20^21: mod_base = OTHER; note = phosphorothioate linkage
  modified_base 21: mod_base = OTHER; note = 2'-O-methyladenosine
  source 1..21: mol_type = other RNA
tagttgaacagtgctcacgga

SEQ ID NO: 514 - RNA, 21 nt, synthetic construct
  modified_base 1: mod_base = OTHER; note = 5'-cyclopropyl phosphonate-2'-O-methyluridine
  modified_base 1^2: mod_base = OTHER; note = phosphorothioate linkage
  modified_base 2: mod_base = OTHER; note = 2'-fluoroadenosine
  modified_base 2^3: mod_base = OTHER; note = phosphorothioate linkage
  modified_base 3: mod_base = cm
  modified_base 3^4: mod_base = OTHER; note = phosphorothioate linkage
  modified_base 4: mod_base = OTHER; note = 2'-fluorouridine
  modified_base 5: mod_base = OTHER; note = 2'-O-methyladenosine
  modified_base 6: mod_base = OTHER; note = 2'-fluoroadenosine
  modified_base 7: mod_base = gm
  modified_base 8: mod_base = um
  modified_base 9: mod_base = OTHER; note = 2'-O-methyladenosine
  modified_base 10: mod_base = OTHER; note = 2'-O-methyladenosine
  modified_base 11: mod_base = cm
  modified_base 12: mod_base = OTHER; note = 2'-fluorouridine
  modified_base 13: mod_base = um
  modified_base 14: mod_base = OTHER; note = 2'-fluorouridine
  modified_base 15: mod_base = gm
  modified_base 16: mod_base = OTHER; note = 2'-fluorouridine
  modified_base 17: mod_base = gm
  modified_base 18: mod_base = OTHER; note = 2'-fluorocytidine
  modified_base 19: mod_base = um
  modified_base 20: mod_base = gm
  modified_base 20^21: mod_base = OTHER; note = phosphorothioate linkage
  modified_base 21: mod_base = gm
  source 1..21: mol_type = other RNA
tactaagtaactttgtgctgg

SEQ ID NO: 515 - RNA, 21 nt, synthetic construct
  modified_base 1: mod_base = OTHER; note = 5'-cyclopropyl phosphonate-2'-O-methyluridine
  modified_base 1^2: mod_base = OTHER; note = phosphorothioate linkage
  modified_base 2: mod_base = OTHER; note = 2'-fluorocytidine
  modified_base 2^3: mod_base = OTHER; note = phosphorothioate linkage
  modified_base 3: mod_base = OTHER; note = 2'-O-methyladenosine
  modified_base 3^4: mod_base = OTHER; note = phosphorothioate linkage
  modified_base 4: mod_base = OTHER; note = 2'-fluorocytidine
  modified_base 5: mod_base = OTHER; note = 2'-O-methyladenosine
  modified_base 6: mod_base = OTHER; note = 2'-fluorouridine
  modified_base 7: mod_base = um
  modified_base 8: mod_base = cm
  modified_base 9: mod_base = cm
  modified_base 10: mod_base = OTHER; note = 2'-O-methyladenosine
  modified_base 11: mod_base = OTHER; note = 2'-O-methyladenosine
  modified_base 12: mod_base = OTHER; note = 2'-fluoroguanosine
  modified_base 13: mod_base = um
  modified_base 14: mod_base = OTHER; note = 2'-fluorouridine
  modified_base 15: mod_base = um
  modified_base 16: mod_base = OTHER; note = 2'-fluoroguanosine
  modified_base 17: mod_base = gm
  modified_base 18: mod_base = OTHER; note = 2'-fluorocytidine
  modified_base 19: mod_base = um
  modified_base 20: mod_base = gm
  modified_base 20^21: mod_base = OTHER; note = phosphorothioate linkage
  modified_base 21: mod_base = cm
  source 1..21: mol_type = other RNA
tcacattccaagtttggctgc

SEQ ID NO: 516 - RNA, 21 nt, synthetic construct
  modified_base 1: mod_base = OTHER; note = 5'-cyclopropyl phosphonate-2'-O-methyluridine
  modified_base 1^2: mod_base = OTHER; note = phosphorothioate linkage
  modified_base 2: mod_base = OTHER; note = 2'-fluoroguanosine
  modified_base 2^3: mod_base = OTHER; note = phosphorothioate linkage
  modified_base 3: mod_base = um
  modified_base 3^4: mod_base = OTHER; note = phosphorothioate linkage
  modified_base 4: mod_base = OTHER; note = 2'-fluoroadenosine
  modified_base 5: mod_base = cm
  modified_base 6: mod_base = OTHER; note = 2'-fluorouridine
  modified_base 7: mod_base = OTHER; note = 2'-O-methyladenosine
  modified_base 8: mod_base = um
  modified_base 9: mod_base = um
  modified_base 10: mod_base = um
  modified_base 11: mod_base = cm
  modified_base 12: mod_base = OTHER; note = 2'-fluorouridine
  modified_base 13: mod_base = cm
  modified_base 14: mod_base = OTHER; note = 2'-fluorouridine
  modified_base 15: mod_base = OTHER; note = 2'-O-methyladenosine
  modified_base 16: mod_base = OTHER; note = 2'-fluorouridine
  modified_base 17: mod_base = um
  modified_base 18: mod_base = OTHER; note = 2'-fluoroguanosine
  modified_base 19: mod_base = cm
  modified_base 20: mod_base = OTHER; note = 2'-O-methyladenosine
  modified_base 20^21: mod_base = OTHER; note = phosphorothioate linkage
  modified_base 21: mod_base = cm
  source 1..21: mol_type = other RNA
tgtactatttctctattgcac

SEQ ID NO: 517 - RNA, 21 nt, synthetic construct
  modified_base 1: mod_base = OTHER; note = 5'-cyclopropyl phosphonate-2'-O-methyluridine
  modified_base 1^2: mod_base = OTHER; note = phosphorothioate linkage
  modified_base 2: mod_base = OTHER; note = 2'-fluoroadenosine
  modified_base 2^3: mod_base = OTHER; note = phosphorothioate linkage
  modified_base 3: mod_base = gm
  modified_base 3^4: mod_base = OTHER; note = phosphorothioate linkage
  modified_base 4: mod_base = OTHER; note = 2'-fluorouridine
  modified_base 5: mod_base = cm
  modified_base 6: mod_base = OTHER; note = 2'-fluoroadenosine
  modified_base 7: mod_base = um
  modified_base 8: mod_base = gm
  modified_base 9: mod_base = gm
  modified_base 10: mod_base = OTHER; note = 2'-O-methyladenosine
  modified_base 11: mod_base = gm
  modified_base 12: mod_base = OTHER; note = 2'-fluoroguanosine
  modified_base 13: mod_base = um
  modified_base 14: mod_base = OTHER; note = 2'-fluorouridine
  modified_base 15: mod_base = cm
  modified_base 16: mod_base = OTHER; note = 2'-fluorouridine
  modified_base 17: mod_base = gm
  modified_base 18: mod_base = OTHER; note = 2'-fluoroadenosine
  modified_base 19: mod_base = cm
  modified_base 20: mod_base = OTHER; note = 2'-O-methyladenosine
  modified_base 20^21: mod_base = OTHER; note = phosphorothioate linkage
  modified_base 21: mod_base = gm
  source 1..21: mol_type = other RNA
tagtcatggaggttctgacag

SEQ ID NO: 518 - RNA, 21 nt, synthetic construct
  modified_base 1: mod_base = OTHER; note = 5'-cyclopropyl phosphonate-2'-O-methyluridine
  modified_base 1^2: mod_base = OTHER; note = phosphorothioate linkage
  modified_base 2: mod_base = OTHER; note = 2'-fluoroguanosine
  modified_base 2^3: mod_base = OTHER; note = phosphorothioate linkage
  modified_base 3: mod_base = OTHER; note = 2'-O-methyladenosine
  modified_base 3^4: mod_base = OTHER; note = phosphorothioate linkage
  modified_base 4: mod_base = OTHER; note = 2'-fluoroadenosine
  modified_base 5: mod_base = um
  modified_base 6: mod_base = OTHER; note = 2'-fluoroguanosine
  modified_base 7: mod_base = um
  modified_base 8: mod_base = gm
  modified_base 9: mod_base = OTHER; note = 2'-O-methyladenosine
  modified_base 10: mod_base = um
  modified_base 11: mod_base = um
  modified_base 12: mod_base = OTHER; note = 2'-fluorouridine
  modified_base 13: mod_base = OTHER; note = 2'-O-methyladenosine
  modified_base 14: mod_base = OTHER; note = 2'-fluorocytidine
  modified_base 15: mod_base = OTHER; note = 2'-O-methyladenosine
  modified_base 16: mod_base = OTHER; note = 2'-fluoroadenosine
  modified_base 17: mod_base = um
  modified_base 18: mod_base = OTHER; note = 2'-fluoroguanosine
  modified_base 19: mod_base = OTHER; note = 2'-O-methyladenosine
  modified_base 20: mod_base = gm
  modified_base 20^21: mod_base = OTHER; note = phosphorothioate linkage
  modified_base 21: mod_base = cm
  source 1..21: mol_type = other RNA
tgaatgtgatttacaatgagc

SEQ ID NO: 519 - RNA, 21 nt, synthetic construct
  modified_base 1: mod_base = OTHER; note = 5'-cyclopropyl phosphonate-2'-O-methyluridine
  modified_base 1^2: mod_base = OTHER; note = phosphorothioate linkage
  modified_base 2: mod_base = OTHER; note = 2'-fluoroadenosine
  modified_base 2^3: mod_base = OTHER; note = phosphorothioate linkage
  modified_base 3: mod_base = cm
  modified_base 3^4: mod_base = OTHER; note = phosphorothioate linkage
  modified_base 4: mod_base = OTHER; note = 2'-fluorouridine
  modified_base 5: mod_base = gm
  modified_base 6: mod_base = OTHER; note = 2'-fluoroadenosine
  modified_base 7: mod_base = um
  modified_base 8: mod_base = gm
  modified_base 9: mod_base = OTHER; note = 2'-O-methyladenosine
  modified_base 10: mod_base = OTHER; note = 2'-O-methyladenosine
  modified_base 11: mod_base = gm
  modified_base 12: mod_base = OTHER; note = 2'-fluorouridine
  modified_base 13: mod_base = cm
  modified_base 14: mod_base = OTHER; note = 2'-fluorocytidine
  modified_base 15: mod_base = um
  modified_base 16: mod_base = OTHER; note = 2'-fluoroguanosine
  modified_base 17: mod_base = um
  modified_base 18: mod_base = OTHER; note = 2'-fluoroadenosine
  modified_base 19: mod_base = cm
  modified_base 20: mod_base = um
  modified_base 20^21: mod_base = OTHER; note = phosphorothioate linkage
  modified_base 21: mod_base = gm
  source 1..21: mol_type = other RNA
tactgatgaagtcctgtactg

SEQ ID NO: 520 - RNA, 21 nt, synthetic construct
  modified_base 1: mod_base = OTHER; note = 5'-cyclopropyl phosphonate-2'-O-methyluridine
  modified_base 1^2: mod_base = OTHER; note = phosphorothioate linkage
  modified_base 2: mod_base = OTHER; note = 2'-fluoroadenosine
  modified_base 2^3: mod_base = OTHER; note = phosphorothioate linkage
  modified_base 3: mod_base = cm
  modified_base 3^4: mod_base = OTHER; note = phosphorothioate linkage
  modified_base 4: mod_base = OTHER; note = 2'-fluoroadenosine
  modified_base 5: mod_base = OTHER; note = 2'-O-methyladenosine
  modified_base 6: mod_base = OTHER; note = 2'-fluorocytidine
  modified_base 7: mod_base = gm
  modified_base 8: mod_base = OTHER; note = 2'-O-methyladenosine
  modified_base 9: mod_base = gm
  modified_base 10: mod_base = OTHER; note = 2'-O-methyladenosine
  modified_base 11: mod_base = cm
  modified_base 12: mod_base = OTHER; note = 2'-fluorouridine
  modified_base 13: mod_base = gm
  modified_base 14: mod_base = OTHER; note = 2'-fluoroadenosine
  modified_base 15: mod_base = OTHER; note = 2'-O-methyladenosine
  modified_base 16: mod_base = OTHER; note = 2'-fluorouridine
  modified_base 17: mod_base = um
  modified_base 18: mod_base = OTHER; note = 2'-fluoroguanosine
  modified_base 19: mod_base = cm
  modified_base 20: mod_base = cm
  modified_base 20^21: mod_base = OTHER; note = phosphorothioate linkage
  modified_base 21: mod_base = um
  source 1..21: mol_type = other RNA
tacaacgagactgaattgcct

SEQ ID NO: 521 - RNA, 21 nt, synthetic construct
  modified_base 1: mod_base = OTHER; note = 5'-cyclopropyl phosphonate-2'-O-methyluridine
  modified_base 1^2: mod_base = OTHER; note = phosphorothioate linkage
  modified_base 2: mod_base = OTHER; note = 2'-fluorouridine
  modified_base 2^3: mod_base = OTHER; note = phosphorothioate linkage
  modified_base 3: mod_base = gm
  modified_base 3^4: mod_base = OTHER; note = phosphorothioate linkage
  modified_base 4: mod_base = OTHER; note = 2'-fluoroadenosine
  modified_base 5: mod_base = gm
  modified_base 6: mod_base = OTHER; note = 2'-fluorouridine
  modified_base 7: mod_base = um
  modified_base 8: mod_base = cm
  modified_base 9: mod_base = um
  modified_base 10: mod_base = um
  modified_base 11: mod_base = cm
  modified_base 12: mod_base = OTHER; note = 2'-fluorocytidine
  modified_base 13: mod_base = OTHER; note = 2'-O-methyladenosine
  modified_base 14: mod_base = OTHER; note = 2'-fluorouridine
  modified_base 15: mod_base = um
  modified_base 16: mod_base = OTHER; note = 2'-fluoroguanosine
  modified_base 17: mod_base = gm
  modified_base 18: mod_base = OTHER; note = 2'-fluorocytidine
  modified_base 19: mod_base = OTHER; note = 2'-O-methyladenosine
  modified_base 20: mod_base = OTHER; note = 2'-O-methyladenosine
  modified_base 20^21: mod_base = OTHER; note = phosphorothioate linkage
  modified_base 21: mod_base = cm
  source 1..21: mol_type = other RNA
ttgagttcttccattggcaac

SEQ ID NO: 522 - RNA, 21 nt, synthetic construct
  modified_base 1: mod_base = OTHER; note = 5'-cyclopropyl phosphonate-2'-O-methyluridine
  modified_base 1^2: mod_base = OTHER; note = phosphorothioate linkage
  modified_base 2: mod_base = OTHER; note = 2'-fluoroadenosine
  modified_base 2^3: mod_base = OTHER; note = phosphorothioate linkage
  modified_base 3: mod_base = cm
  modified_base 3^4: mod_base = OTHER; note = phosphorothioate linkage
  modified_base 4: mod_base = OTHER; note = 2'-fluorouridine
  modified_base 5: mod_base = OTHER; note = 2'-O-methyladenosine
  modified_base 6: mod_base = OTHER; note = 2'-fluoroadenosine
  modified_base 7: mod_base = gm
  modified_base 8: mod_base = um
  modified_base 9: mod_base = gm
  modified_base 10: mod_base = OTHER; note = 2'-O-methyladenosine
  modified_base 11: mod_base = gm
  modified_base 12: mod_base = OTHER; note = 2'-fluorouridine
  modified_base 13: mod_base = cm
  modified_base 14: mod_base = OTHER; note = 2'-fluorouridine
  modified_base 15: mod_base = um
  modified_base 16: mod_base = OTHER; note = 2'-fluoroguanosine
  modified_base 17: mod_base = cm
  modified_base 18: mod_base = OTHER; note = 2'-fluoroadenosine
  modified_base 19: mod_base = um
  modified_base 20: mod_base = gm
  modified_base 20^21: mod_base = OTHER; note = phosphorothioate linkage
  modified_base 21: mod_base = gm
  source 1..21: mol_type = other RNA
tactaagtgagtcttgcatgg

SEQ ID NO: 523 - RNA, 21 nt, synthetic construct
  modified_base 1: mod_base = OTHER; note = 5'-cyclopropyl phosphonate-2'-O-methyluridine
  modified_base 1^2: mod_base = OTHER; note = phosphorothioate linkage
  modified_base 2: mod_base = OTHER; note = 2'-fluorocytidine
  modified_base 2^3: mod_base = OTHER; note = phosphorothioate linkage
  modified_base 3: mod_base = OTHER; note = 2'-O-methyladenosine
  modified_base 3^4: mod_base = OTHER; note = phosphorothioate linkage
  modified_base 4: mod_base = OTHER; note = 2'-fluoroguanosine
  modified_base 5: mod_base = OTHER; note = 2'-O-methyladenosine
  modified_base 6: mod_base = OTHER; note = 2'-fluoroadenosine
  modified_base 7: mod_base = OTHER; note = 2'-O-methyladenosine
  modified_base 8: mod_base = um
  modified_base 9: mod_base = um
  modified_base 10: mod_base = um
  modified_base 11: mod_base = cm
  modified_base 12: mod_base = OTHER; note = 2'-fluoroadenosine
  modified_base 13: mod_base = cm
  modified_base 14: mod_base = OTHER; note = 2'-fluorouridine
  modified_base 15: mod_base = cm
  modified_base 16: mod_base = OTHER; note = 2'-fluoroadenosine
  modified_base 17: mod_base = um
  modified_base 18: mod_base = OTHER; note = 2'-fluorocytidine
  modified_base 19: mod_base = cm
  modified_base 20: mod_base = cm
  modified_base 20^21: mod_base = OTHER; note = phosphorothioate linkage
  modified_base 21: mod_base = um
  source 1..21: mol_type = other RNA
tcagaaatttcactcatccct

SEQ ID NO: 524 - RNA, 21 nt, synthetic construct
  modified_base 1: mod_base = OTHER; note = 5'-cyclopropyl phosphonate-2'-O-methyladenosine
  modified_base 1^2: mod_base = OTHER; note = phosphorothioate linkage
  modified_base 2: mod_base = OTHER; note = 2'-fluoroguanosine
  modified_base 2^3: mod_base = OTHER; note = phosphorothioate linkage
  modified_base 3: mod_base = OTHER; note = 2'-O-methyladenosine
  modified_base 3^4: mod_base = OTHER; note = phosphorothioate linkage
  modified_base 4: mod_base = OTHER; note = 2'-fluorouridine
  modified_base 5: mod_base = cm
  modified_base 6: mod_base = OTHER; note = 2'-fluoroadenosine
  modified_base 7: mod_base = um
  modified_base 8: mod_base = um
  modified_base 9: mod_base = cm
  modified_base 10: mod_base = OTHER; note = 2'-O-methyladenosine
  modified_base 11: mod_base = OTHER; note = 2'-O-methyladenosine
  modified_base 12: mod_base = OTHER; note = 2'-fluorocytidine
  modified_base 13: mod_base = um
  modified_base 14: mod_base = OTHER; note = 2'-fluorouridine
  modified_base 15: mod_base = gm
  modified_base 16: mod_base = OTHER; note = 2'-fluorocytidine
  modified_base 17: mod_base = um
  modified_base 18: mod_base = OTHER; note = 2'-fluorocytidine
  modified_base 19: mod_base = cm
  modified_base 20: mod_base = OTHER; note = 2'-O-methyladenosine
  modified_base 20^21: mod_base = OTHER; note = phosphorothioate linkage
  modified_base 21: mod_base = gm
  source 1..21: mol_type = other RNA
agatcattcaacttgctccag

SEQ ID NO: 525 - RNA, 21 nt, synthetic construct
  modified_base 1: mod_base = OTHER; note = 5'-cyclopropyl phosphonate-2'-O-methyluridine
  modified_base 1^2: mod_base = OTHER; note = phosphorothioate linkage
  modified_base 2: mod_base = OTHER; note = 2'-fluorocytidine
  modified_base 2^3: mod_base = OTHER; note = phosphorothioate linkage
  modified_base 3: mod_base = OTHER; note = 2'-O-methyladenosine
  modified_base 3^4: mod_base = OTHER; note = phosphorothioate linkage
  modified_base 4: mod_base = OTHER; note = 2'-fluorouridine
  modified_base 5: mod_base = cm
  modified_base 6: mod_base = OTHER; note = 2'-fluoroadenosine
  modified_base 7: mod_base = gm
  modified_base 8: mod_base = cm
  modified_base 9: mod_base = um
  modified_base 10: mod_base = um
  modified_base 11: mod_base = um
  modified_base 12: mod_base = OTHER; note = 2'-fluorouridine
  modified_base 13: mod_base = cm
  modified_base 14: mod_base = OTHER; note = 2'-fluorocytidine
  modified_base 15: mod_base = OTHER; note = 2'-O-methyladenosine
  modified_base 16: mod_base = OTHER; note = 2'-fluoroguanosine
  modified_base 17: mod_base = gm
  modified_base 18: mod_base = OTHER; note = 2'-fluoroguanosine
  modified_base 19: mod_base = um
  modified_base 20: mod_base = cm
  modified_base 20^21: mod_base = OTHER; note = phosphorothioate linkage
  modified_base 21: mod_base = gm
  source 1..21: mol_type = other RNA
tcatcagcttttccagggtcg

SEQ ID NO: 526 - RNA, 21 nt, synthetic construct
  modified_base 1: mod_base = OTHER; note = 5'-cyclopropyl phosphonate-2'-O-methyluridine
  modified_base 1^2: mod_base = OTHER; note = phosphorothioate linkage
  modified_base 2: mod_base = OTHER; note = 2'-fluoroadenosine
  modified_base 2^3: mod_base = OTHER; note = phosphorothioate linkage
  modified_base 3: mod_base = cm
  modified_base 3^4: mod_base = OTHER; note = phosphorothioate linkage
  modified_base 4: mod_base = OTHER; note = 2'-fluorouridine
  modified_base 5: mod_base = cm
  modified_base 6: mod_base = OTHER; note = 2'-fluoroguanosine
  modified_base 7: mod_base = OTHER; note = 2'-O-methyladenosine
  modified_base 8: mod_base = OTHER; note = 2'-O-methyladenosine
  modified_base 9: mod_base = gm
  modified_base 10: mod_base = gm
  modified_base 11: mod_base = cm
  modified_base 12: mod_base = OTHER; note = 2'-fluorocytidine
  modified_base 13: mod_base = um
  modified_base 14: mod_base = OTHER; note = 2'-fluorouridine
  modified_base 15: mod_base = cm
  modified_base 16: mod_base = OTHER; note = 2'-fluoroadenosine
  modified_base 17: mod_base = um
  modified_base 18: mod_base = OTHER; note = 2'-fluorocytidine
  modified_base 19: mod_base = OTHER; note = 2'-O-methyladenosine
  modified_base 20: mod_base = gm
  modified_base 20^21: mod_base = OTHER; note = phosphorothioate linkage
  modified_base 21: mod_base = cm
  source 1..21: mol_type = other RNA
tactcgaaggccttcatcagc

SEQ ID NO: 527 - RNA, 21 nt, synthetic construct
  modified_base 1: mod_base = OTHER; note = 5'-cyclopropyl phosphonate-2'-O-methyluridine
  modified_base 1^2: mod_base = OTHER; note = phosphorothioate linkage
  modified_base 2: mod_base = OTHER; note = 2'-fluorouridine
  modified_base 2^3: mod_base = OTHER; note = phosphorothioate linkage
  modified_base 3: mod_base = um
  modified_base 3^4: mod_base = OTHER; note = phosphorothioate linkage
  modified_base 4: mod_base = OTHER; note = 2'-fluorouridine
  modified_base 5: mod_base = cm
  modified_base 6: mod_base = OTHER; note = 2'-fluorouridine
  modified_base 7: mod_base = um
  modified_base 8: mod_base = um
  modified_base 9: mod_base = gm
  modified_base 10: mod_base = gm
  modified_base 11: mod_base = um
  modified_base 12: mod_base = OTHER; note = 2'-fluorocytidine
  modified_base 13: mod_base = gm
  modified_base 14: mod_base = OTHER; note = 2'-fluoroguanosine
  modified_base 15: mod_base = um
  modified_base 16: mod_base = OTHER; note = 2'-fluoroguanosine
  modified_base 17: mod_base = cm
  modified_base 18: mod_base = OTHER; note = 2'-fluoroadenosine
  modified_base 19: mod_base = gm
  modified_base 20: mod_base = cm
  modified_base 20^21: mod_base = OTHER; note = phosphorothioate linkage
  modified_base 21: mod_base = gm
  source 1..21: mol_type = other RNA
ttttctttggtcggtgcagcg

SEQ ID NO: 528 - RNA, 21 nt, synthetic construct
  modified_base 1: mod_base = OTHER; note = 5'-cyclopropyl phosphonate-2'-O-methyluridine
  modified_base 1^2: mod_base = OTHER; note = phosphorothioate linkage
  modified_base 2: mod_base = OTHER; note = 2'-fluorocytidine
  modified_base 2^3: mod_base = OTHER; note = phosphorothioate linkage
  modified_base 3: mod_base = um
  modified_base 3^4: mod_base = OTHER; note = phosphorothioate linkage
  modified_base 4: mod_base = OTHER; note = 2'-fluorouridine
  modified_base 5: mod_base = um
  modified_base 6: mod_base = OTHER; note = 2'-fluorocytidine
  modified_base 7: mod_base = um
  modified_base 8: mod_base = um
  modified_base 9: mod_base = um
  modified_base 10: mod_base = gm
  modified_base 11: mod_base = gm
  modified_base 12: mod_base = OTHER; note = 2'-fluorouridine
  modified_base 13: mod_base = cm
  modified_base 14: mod_base = OTHER; note = 2'-fluoroguanosine
  modified_base 15: mod_base = gm
  modified_base 16: mod_base = OTHER; note = 2'-fluorouridine
  modified_base 17: mod_base = gm
  modified_base 18: mod_base = OTHER; note = 2'-fluorocytidine
  modified_base 19: mod_base = OTHER; note = 2'-O-methyladenosine
  modified_base 20: mod_base = gm
  modified_base 20^21: mod_base = OTHER; note = phosphorothioate linkage
  modified_base 21: mod_base = cm
  source 1..21: mol_type = other RNA
tctttctttggtcggtgcagc

SEQ ID NO: 529 - RNA, 21 nt, synthetic construct
  modified_base 1: mod_base = OTHER; note = 5'-cyclopropyl phosphonate-2'-O-methyluridine
  modified_base 1^2: mod_base = OTHER; note = phosphorothioate linkage
  modified_base 2: mod_base = OTHER; note = 2'-fluorouridine
  modified_base 2^3: mod_base = OTHER; note = phosphorothioate linkage
  modified_base 3: mod_base = cm
  modified_base 3^4: mod_base = OTHER; note = phosphorothioate linkage
  modified_base 4: mod_base = OTHER; note = 2'-fluorouridine
  modified_base 5: mod_base = um
  modified_base 6: mod_base = OTHER; note = 2'-fluorouridine
  modified_base 7: mod_base = cm
  modified_base 8: mod_base = um
  modified_base 9: mod_base = um
  modified_base 10: mod_base = um
  modified_base 11: mod_base = gm
  modified_base 12: mod_base = OTHER; note = 2'-fluoroguanosine
  modified_base 13: mod_base = um
  modified_base 14: mod_base = OTHER; note = 2'-fluorocytidine
  modified_base 15: mod_base = gm
  modified_base 16: mod_base = OTHER; note = 2'-fluoroguanosine
  modified_base 17: mod_base = um
  modified_base 18: mod_base = OTHER; note = 2'-fluoroguanosine
  modified_base 19: mod_base = cm
  modified_base 20: mod_base = OTHER; note = 2'-O-methyladenosine
  modified_base 20^21: mod_base = OTHER; note = phosphorothioate linkage
  modified_base 21: mod_base = gm
  source 1..21: mol_type = other RNA
ttctttctttggtcggtgcag

SEQ ID NO: 530 - RNA, 21 nt, synthetic construct
  modified_base 1: mod_base = OTHER; note = 5'-cyclopropyl phosphonate-2'-O-methyluridine
  modified_base 1^2: mod_base = OTHER; note = phosphorothioate linkage
  modified_base 2: mod_base = OTHER; note = 2'-fluoroguanosine
  modified_base 2^3: mod_base = OTHER; note = phosphorothioate linkage
  modified_base 3: mod_base = OTHER; note = 2'-O-methyladenosine
  modified_base 3^4: mod_base = OTHER; note = phosphorothioate linkage
  modified_base 4: mod_base = cm
  modified_base 5: mod_base = OTHER; note = 2'-fluorouridine
  modified_base 6: mod_base = cm
  modified_base 7: mod_base = gm
  modified_base 8: mod_base = OTHER; note = 2'-O-methyladenosine
  modified_base 9: mod_base = OTHER; note = 2'-O-methyladenosine
  modified_base 10: mod_base = gm
  modified_base 11: mod_base = gm
  modified_base 12: mod_base = OTHER; note = 2'-fluorocytidine
  modified_base 13: mod_base = cm
  modified_base 14: mod_base = OTHER; note = 2'-fluorouridine
  modified_base 15: mod_base = um
  modified_base 16: mod_base = OTHER; note = 2'-fluorocytidine
  modified_base 17: mod_base = OTHER; note = 2'-O-methyladenosine
  modified_base 18: mod_base = um
  modified_base 19: mod_base = cm
  modified_base 20: mod_base = OTHER; note = 2'-O-methyladenosine
  modified_base 20^21: mod_base = OTHER; note = phosphorothioate linkage
  modified_base 21: mod_base = gm
  source 1..21: mol_type = other RNA
tgactcgaaggccttcatcag

SEQ ID NO: 531 - RNA, 21 nt, synthetic construct
  modified_base 1: mod_base = OTHER; note = 5'-cyclopropyl phosphonate-2'-O-methyluridine
  modified_base 1^2: mod_base = OTHER; note = phosphorothioate linkage
  modified_base 2: mod_base = OTHER; note = 2'-fluoroguanosine
  modified_base 2^3: mod_base = OTHER; note = phosphorothioate linkage
  modified_base 3: mod_base = OTHER; note = 2'-O-methyladenosine
  modified_base 3^4: mod_base = OTHER; note = phosphorothioate linkage
  modified_base 4: mod_base = cm
  modified_base 5: mod_base = um
  modified_base 6: mod_base = cm
  modified_base 7: mod_base = OTHER; note = 2'-fluoroguanosine
  modified_base 8: mod_base = OTHER; note = 2'-O-methyladenosine
  modified_base 9: mod_base = OTHER; note = 2'-O-methyladenosine
  modified_base 10: mod_base = gm
  modified_base 11: mod_base = gm
  modified_base 12: mod_base = OTHER; note = 2'-fluorocytidine
  modified_base 13: mod_base = cm
  modified_base 14: mod_base = OTHER; note = 2'-fluorouridine
  modified_base 15: mod_base = um
  modified_base 16: mod_base = OTHER; note = 2'-fluorocytidine
  modified_base 17: mod_base = OTHER; note = 2'-O-methyladenosine
  modified_base 18: mod_base = um
  modified_base 19: mod_base = cm
  modified_base 20: mod_base = OTHER; note = 2'-O-methyladenosine
  modified_base 20^21: mod_base = OTHER; note = phosphorothioate linkage
  modified_base 21: mod_base = gm
  source 1..21: mol_type = other RNA
tgactcgaaggccttcatcag

SEQ ID NO: 532 - RNA, 21 nt, synthetic construct
  modified_base 1: mod_base = OTHER; note = 5'-cyclopropyl phosphonate-2'-O-methyluridine
  modified_base 1^2: mod_base = OTHER; note = phosphorothioate linkage
  modified_base 2: mod_base = OTHER; note = 2'-fluoroguanosine
  modified_base 2^3: mod_base = OTHER; note = phosphorothioate linkage
  modified_base 3: mod_base = OTHER; note = 2'-O-methyladenosine
  modified_base 3^4: mod_base = OTHER; note = phosphorothioate linkage
  modified_base 4: mod_base = cm
  modified_base 5: mod_base = um
  modified_base 6: mod_base = cm
  modified_base 7: mod_base = gm
  modified_base 8: mod_base = OTHER; note = 2'-O-methyladenosine
  modified_base 9: mod_base = OTHER; note = 2'-fluoroadenosine
  modified_base 10: mod_base = gm
  modified_base 11: mod_base = gm
  modified_base 12: mod_base = OTHER; note = 2'-fluorocytidine
  modified_base 13: mod_base = cm
  modified_base 14: mod_base = OTHER; note = 2'-fluorouridine
  modified_base 15: mod_base = um
  modified_base 16: mod_base = OTHER; note = 2'-fluorocytidine
  modified_base 17: mod_base = OTHER; note = 2'-O-methyladenosine
  modified_base 18: mod_base = um
  modified_base 19: mod_base = cm
  modified_base 20: mod_base = OTHER; note = 2'-O-methyladenosine
  modified_base 20^21: mod_base = OTHER; note = phosphorothioate linkage
  modified_base 21: mod_base = gm
  source 1..21: mol_type = other RNA
tgactcgaaggccttcatcag

SEQ ID NO: 533 - RNA, 21 nt, synthetic construct
  modified_base 1: mod_base = OTHER; note = 5'-cyclopropyl phosphonate-2'-O-methyluridine
  modified_base 1^2: mod_base = OTHER; note = phosphorothioate linkage
  modified_base 2: mod_base = OTHER; note = 2'-fluoroguanosine
  modified_base 2^3: mod_base = OTHER; note = phosphorothioate linkage
  modified_base 3: mod_base = OTHER; note = 2'-O-methyladenosine
  modified_base 4: mod_base = cm
  modified_base 5: mod_base = um
  modified_base 6: mod_base = cm
  modified_base 7: mod_base = OTHER; note = 2'-fluoroguanosine
  modified_base 8: mod_base = OTHER; note = 2'-O-methyladenosine
  modified_base 9: mod_base = OTHER; note = 2'-O-methyladenosine
  modified_base 10: mod_base = gm
  modified_base 11: mod_base = gm
  modified_base 12: mod_base = OTHER; note = 2'-fluorocytidine
  modified_base 13: mod_base = cm
  modified_base 14: mod_base = OTHER; note = 2'-fluorouridine
  modified_base 15: mod_base = um
  modified_base 16: mod_base = OTHER; note = 2'-fluorocytidine
  modified_base 17: mod_base = OTHER; note = 2'-O-methyladenosine
  modified_base 18: mod_base = um
  modified_base 19: mod_base = cm
  modified_base 20: mod_base = OTHER; note = 2'-O-methyladenosine
  modified_base 20^21: mod_base = OTHER; note = phosphorothioate linkage
  modified_base 21: mod_base = gm
  source 1..21: mol_type = other RNA
tgactcgaaggccttcatcag

SEQ ID NO: 534 - RNA, 21 nt, synthetic construct
  modified_base 1: mod_base = OTHER; note = 5'-cyclopropyl phosphonate-2'-O-methyluridine
  modified_base 1^2: mod_base = OTHER; note = phosphorothioate linkage
  modified_base 2: mod_base = OTHER; note = 2'-fluoroguanosine
  modified_base 2^3: mod_base = OTHER; note = phosphorothioate linkage
  modified_base 3: mod_base = OTHER; note = 2'-O-methyladenosine
  modified_base 3^4: mod_base = OTHER; note = phosphorothioate linkage
  modified_base 4: mod_base = cm
  modified_base 5: mod_base = um
  modified_base 6: mod_base = cm
  modified_base 7: mod_base = OTHER; note = 2'-fluoroguanosine
  modified_base 8: mod_base = OTHER; note = 2'-O-methyladenosine
  modified_base 9: mod_base = OTHER; note = 2'-O-methyladenosine
  modified_base 10: mod_base = gm
  modified_base 11: mod_base = gm
  modified_base 12: mod_base = cm
  modified_base 13: mod_base = cm
  modified_base 14: mod_base = OTHER; note = 2'-fluorouridine
  modified_base 15: mod_base = um
  modified_base 16: mod_base = cm
  modified_base 17: mod_base = OTHER; note = 2'-O-methyladenosine
  modified_base 18: mod_base = um
  modified_base 19: mod_base = cm
  modified_base 20: mod_base = OTHER; note = 2'-O-methyladenosine
  modified_base 20^21: mod_base = OTHER; note = phosphorothioate linkage
  modified_base 21: mod_base = gm
  source 1..21: mol_type = other RNA
tgactcgaaggccttcatcag

SEQ ID NO: 535 - RNA, 21 nt, synthetic construct
  modified_base 1: mod_base = OTHER; note = 5'-cyclopropyl phosphonate-2'-O-methyluridine
  modified_base 1^2: mod_base = OTHER; note = phosphorothioate linkage
  modified_base 2: mod_base = OTHER; note = 2'-fluoroguanosine
  modified_base 2^3: mod_base = OTHER; note = phosphorothioate linkage
  modified_base 3: mod_base = OTHER; note = 2'-O-methyladenosine
  modified_base 3^4: mod_base = OTHER; note = phosphorothioate linkage
  modified_base 4: mod_base = cm
  modified_base 5: mod_base = um
  modified_base 6: mod_base = cm
  modified_base 7: mod_base = gm
  modified_base 8: mod_base = OTHER; note = 2'-O-methyladenosine
  modified_base 9: mod_base = OTHER; note = 2'-fluoroadenosine
  modified_base 10: mod_base = gm
  modified_base 11: mod_base = gm
  modified_base 12: mod_base = cm
  modified_base 13: mod_base = cm
  modified_base 14: mod_base = OTHER; note = 2'-fluorouridine
  modified_base 15: mod_base = um
  modified_base 16: mod_base = cm
  modified_base 17: mod_base = OTHER; note = 2'-O-methyladenosine
  modified_base 18: mod_base = um
  modified_base 19: mod_base = cm
  modified_base 20: mod_base = OTHER; note = 2'-O-methyladenosine
  modified_base 20^21: mod_base = OTHER; note = phosphorothioate linkage
  modified_base 21: mod_base = gm
  source 1..21: mol_type = other RNA
tgactcgaaggccttcatcag

SEQ ID NO: 536 - RNA, 21 nt, synthetic construct
  modified_base 1: mod_base = OTHER; note = 5'-cyclopropyl phosphonate-2'-O-methyluridine
  modified_base 1^2: mod_base = OTHER; note = phosphorothioate linkage
  modified_base 2: mod_base = OTHER; note = 2'-fluoroguanosine
  modified_base 2^3: mod_base = OTHER; note = phosphorothioate linkage
  modified_base 3: mod_base = OTHER; note = 2'-O-methyladenosine
  modified_base 3^4: mod_base = OTHER; note = phosphorothioate linkage
  modified_base 4: mod_base = cm
  modified_base 5: mod_base = um
  modified_base 6: mod_base = cm
  modified_base 7: mod_base = OTHER; note = 2'-fluoroguanosine
  modified_base 8: mod_base = OTHER; note = 2'-O-methyladenosine
  modified_base 9: mod_base = OTHER; note = 2'-O-methyladenosine
  modified_base 10: mod_base = gm
  modified_base 11: mod_base = gm
  modified_base 12: mod_base = cm
  modified_base 13: mod_base = cm
  modified_base 14: mod_base = OTHER; note = 2'-fluorouridine
  modified_base 15: mod_base = um
  modified_base 16: mod_base = cm
  modified_base 17: mod_base = OTHER; note = 2'-O-methyladenosine
  modified_base 18: mod_base = um
  modified_base 19: mod_base = cm
  modified_base 20: mod_base = OTHER; note = 2'-fluoroadenosine
  modified_base 20^21: mod_base = OTHER; note = phosphorothioate linkage
  modified_base 21: mod_base = gm
  source 1..21: mol_type = other RNA
tgactcgaaggccttcatcag

SEQ ID NO: 537 - RNA, 21 nt, synthetic construct
  modified_base 1: mod_base = OTHER; note = 5'-cyclopropyl phosphonate-2'-O-methyluridine
  modified_base 1^2: mod_base = OTHER; note = phosphorothioate linkage
  modified_base 2: mod_base = OTHER; note = 2'-fluorocytidine
  modified_base 2^3: mod_base = OTHER; note = phosphorothioate linkage
  modified_base 3: mod_base = OTHER; note = 2'-O-methyladenosine
  modified_base 3^4: mod_base = OTHER; note = phosphorothioate linkage
  modified_base 4: mod_base = um
  modified_base 5: mod_base = OTHER; note = 2'-fluoroguanosine
  modified_base 6: mod_base = OTHER; note = 2'-O-methyladenosine
  modified_base 7: mod_base = um
  modified_base 8: mod_base = cm
  modified_base 9: mod_base = gm
  modified_base 10: mod_base = OTHER; note = 2'-O-methyladenosine
  modified_base 11: mod_base = um
  modified_base 12: mod_base = OTHER; note = 2'-fluoroguanosine
  modified_base 13: mod_base = um
  modified_base 14: mod_base = OTHER; note = 2'-fluoroadenosine
  modified_base 15: mod_base = gm
  modified_base 16: mod_base = OTHER; note = 2'-fluorouridine
  modified_base 17: mod_base = um
  modified_base 18: mod_base = cm
  modified_base 19: mod_base = OTHER; note = 2'-O-methyladenosine
  modified_base 20: mod_base = OTHER; note = 2'-O-methyladenosine
  modified_base 20^21: mod_base = OTHER; note = phosphorothioate linkage
  modified_base 21: mod_base = gm
  source 1..21: mol_type = other RNA
tcatgatcgatgtagttcaag

SEQ ID NO: 538 - RNA, 21 nt, synthetic construct
  modified_base 1: mod_base = OTHER; note = 5'-cyclopropyl phosphonate-2'-O-methyluridine
  modified_base 1^2: mod_base = OTHER; note = phosphorothioate linkage
  modified_base 2: mod_base = OTHER; note = 2'-fluorocytidine
  modified_base 2^3: mod_base = OTHER; note = phosphorothioate linkage
  modified_base 3: mod_base = OTHER; note = 2'-O-methyladenosine
  modified_base 3^4: mod_base = OTHER; note = phosphorothioate linkage
  modified_base 4: mod_base = um
  modified_base 5: mod_base = gm
  modified_base 6: mod_base = OTHER; note = 2'-O-methyladenosine
  modified_base 7: mod_base = OTHER; note = 2'-fluorouridine
  modified_base 8: mod_base = cm
  modified_base 9: mod_base = gm
  modified_base 10: mod_base = OTHER; note = 2'-O-methyladenosine
  modified_base 11: mod_base = um
  modified_base 12: mod_base = OTHER; note = 2'-fluoroguanosine
  modified_base 13: mod_base = um
  modified_base 14: mod_base = OTHER; note = 2'-fluoroadenosine
  modified_base 15: mod_base = gm
  modified_base 16: mod_base = OTHER; note = 2'-fluorouridine
  modified_base 17: mod_base = um
  modified_base 18: mod_base = cm
  modified_base 19: mod_base = OTHER; note = 2'-O-methyladenosine
  modified_base 20: mod_base = OTHER; note = 2'-O-methyladenosine
  modified_base 20^21: mod_base = OTHER; note = phosphorothioate linkage
  modified_base 21: mod_base = gm
  source 1..21: mol_type = other RNA
tcatgatcgatgtagttcaag

SEQ ID NO: 539 - RNA, 21 nt, synthetic construct
  modified_base 1: mod_base = OTHER; note = 5'-cyclopropyl phosphonate-2'-O-methyluridine
  modified_base 1^2: mod_base = OTHER; note = phosphorothioate linkage
  modified_base 2: mod_base = OTHER; note = 2'-fluorocytidine
  modified_base 2^3: mod_base = OTHER; note = phosphorothioate linkage
  modified_base 3: mod_base = OTHER; note = 2'-O-methyladenosine
  modified_base 4: mod_base = um
  modified_base 5: mod_base = gm
  modified_base 6: mod_base = OTHER; note = 2'-O-methyladenosine
  modified_base 7: mod_base = OTHER; note = 2'-fluorouridine
  modified_base 8: mod_base = cm
  modified_base 9: mod_base = gm
  modified_base 10: mod_base = OTHER; note = 2'-O-methyladenosine
  modified_base 11: mod_base = um
  modified_base 12: mod_base = OTHER; note = 2'-fluoroguanosine
  modified_base 13: mod_base = um
  modified_base 14: mod_base = OTHER; note = 2'-fluoroadenosine
  modified_base 15: mod_base = gm
  modified_base 16: mod_base = OTHER; note = 2'-fluorouridine
  modified_base 17: mod_base = um
  modified_base 18: mod_base = cm
  modified_base 19: mod_base = OTHER; note = 2'-O-methyladenosine
  modified_base 20: mod_base = OTHER; note = 2'-O-methyladenosine
  modified_base 20^21: mod_base = OTHER; note = phosphorothioate linkage
  modified_base 21: mod_base = gm
  source 1..21: mol_type = other RNA
tcatgatcgatgtagttcaag

SEQ ID NO: 540 - RNA, 21 nt, synthetic construct
  modified_base 1: mod_base = OTHER; note = 5'-cyclopropyl phosphonate-2'-O-methyluridine
  modified_base 1^2: mod_base = OTHER; note = phosphorothioate linkage
  modified_base 2: mod_base = OTHER; note = 2'-fluorocytidine
  modified_base 2^3: mod_base = OTHER; note = phosphorothioate linkage
  modified_base 3: mod_base = OTHER; note = 2'-O-methyladenosine
  modified_base 4: mod_base = um
  modified_base 5: mod_base = gm
  modified_base 6: mod_base = OTHER; note = 2'-O-methyladenosine
  modified_base 7: mod_base = OTHER; note = 2'-fluorouridine
  modified_base 8: mod_base = cm
  modified_base 9: mod_base = gm
  modified_base 10: mod_base = OTHER; note = 2'-O-methyladenosine
  modified_base 11: mod_base = um
  modified_base 12: mod_base = OTHER; note = 2'-fluoroguanosine
  modified_base 13: mod_base = um
  modified_base 14: mod_base = OTHER; note = 2'-fluoroadenosine
  modified_base 15: mod_base = gm
  modified_base 16: mod_base = OTHER; note = 2'-fluorouridine
  modified_base 17: mod_base = um
  modified_base 18: mod_base = cm
  modified_base 19: mod_base = OTHER; note = 2'-O-methyladenosine
  modified_base 20: mod_base = OTHER; note = 2'-O-methyladenosine
  modified_base 20^21: mod_base = OTHER; note = phosphorodithioate linkage
  modified_base 21: mod_base = gm
  source 1..21: mol_type = other RNA
tcatgatcgatgtagttcaag

SEQ ID NO: 541 - RNA, 21 nt, synthetic construct
  modified_base 1: mod_base = OTHER; note = 5'-cyclopropyl phosphonate-2'-O-methyluridine
  modified_base 1^2: mod_base = OTHER; note = phosphorodithioate linkage
  modified_base 2: mod_base = OTHER; note = 2'-fluorocytidine
  modified_base 2^3: mod_base = OTHER; note = phosphorothioate linkage
  modified_base 3: mod_base = OTHER; note = 2'-O-methyladenosine
  modified_base 4: mod_base = um
  modified_base 5: mod_base = gm
  modified_base 6: mod_base = OTHER; note = 2'-O-methyladenosine
  modified_base 7: mod_base = OTHER; note = 2'-fluorouridine
  modified_base 8: mod_base = cm
  modified_base 9: mod_base = gm
  modified_base 10: mod_base = OTHER; note = 2'-O-methyladenosine
  modified_base 11: mod_base = um
  modified_base 12: mod_base = OTHER; note = 2'-fluoroguanosine
  modified_base 13: mod_base = um
  modified_base 14: mod_base = OTHER; note = 2'-fluoroadenosine
  modified_base 15: mod_base = gm
  modified_base 16: mod_base = OTHER; note = 2'-fluorouridine
  modified_base 17: mod_base = um
  modified_base 18: mod_base = cm
  modified_base 19: mod_base = OTHER; note = 2'-O-methyladenosine
  modified_base 20: mod_base = OTHER; note = 2'-O-methyladenosine
  modified_base 20^21: mod_base = OTHER; note = phosphorodithioate linkage
  modified_base 21: mod_base = gm
  source 1..21: mol_type = other RNA
tcatgatcgatgtagttcaag

SEQ ID NO: 542 - RNA, 21 nt, synthetic construct
  modified_base 1: mod_base = OTHER; note = 5'-cyclopropyl phosphonate-2'-O-methyluridine
  modified_base 1^2: mod_base = OTHER; note = phosphorothioate linkage
  modified_base 2: mod_base = OTHER; note = 2'-fluorocytidine
  modified_base 2^3: mod_base = OTHER; note = phosphorothioate linkage
  modified_base 3: mod_base = OTHER; note = 2'-O-methyladenosine
  modified_base 4: mod_base = um
  modified_base 5: mod_base = gm
  modified_base 6: mod_base = OTHER; note = 2'-O-methyladenosine
  modified_base 7: mod_base = OTHER; note = 2'-fluorouridine
  modified_base 8: mod_base = cm
  modified_base 9: mod_base = gm
  modified_base 10: mod_base = OTHER; note = 2'-O-methyladenosine
  modified_base 11: mod_base = um
  modified_base 12: mod_base = gm
  modified_base 13: mod_base = um
  modified_base 14: mod_base = OTHER; note = 2'-fluoroadenosine
  modified_base 15: mod_base = gm
  modified_base 16: mod_base = um
  modified_base 17: mod_base = um
  modified_base 18: mod_base = cm
  modified_base 19: mod_base = OTHER; note = 2'-O-methyladenosine
  modified_base 20: mod_base = OTHER; note = 2'-fluoroadenosine
  modified_base 20^21: mod_base = OTHER; note = phosphorothioate linkage
  modified_base 21: mod_base = gm
  source 1..21: mol_type = other RNA
tcatgatcgatgtagttcaag

SEQ ID NO: 543 - RNA, 21 nt, synthetic construct
  modified_base 7: mod_base = OTHER; note = thymine
  modified_base 1: mod_base = OTHER; note = 5'-cyclopropyl phosphonate-2'-O-methyluridine
  modified_base 1^2: mod_base = OTHER; note = phosphorothioate linkage
  modified_base 2: mod_base = OTHER; note = 2'-deoxycytidine
  modified_base 2^3: mod_base = OTHER; note = phosphorothioate linkage
  modified_base 3: mod_base = OTHER; note = 2'-O-methyladenosine
  modified_base 4: mod_base = um
  modified_base 5: mod_base = gm
  modified_base 6: mod_base = OTHER; note = 2'-O-methyladenosine
  modified_base 7: mod_base = OTHER; note = 2'-deoxythymidine
  modified_base 8: mod_base = cm
  modified_base 9: mod_base = gm
  modified_base 10: mod_base = OTHER; note = 2'-O-methyladenosine
  modified_base 11: mod_base = um
  modified_base 12: mod_base = OTHER; note = 2'-deoxyguanosine
  modified_base 13: mod_base = um
  modified_base 14: mod_base = OTHER; note = 2'-fluoroadenosine
  modified_base 15: mod_base = gm
  modified_base 16: mod_base = OTHER; note = 2'-deoxyuridine
  modified_base 17: mod_base = um
  modified_base 18: mod_base = cm
  modified_base 19: mod_base = OTHER; note = 2'-O-methyladenosine
  modified_base 20: mod_base = OTHER; note = 2'-O-methyladenosine
  modified_base 20^21: mod_base = OTHER; note = phosphorothioate linkage
  modified_base 21: mod_base = gm
  source 1..21: mol_type = other RNA
tcatgatcgatgtagttcaag

SEQ ID NO: 544 - RNA, 21 nt, synthetic construct
  modified_base 7: mod_base = OTHER; note = thymine
  modified_base 1: mod_base = OTHER; note = 5'-cyclopropyl phosphonate-2'-O-methyluridine
  modified_base 1^2: mod_base = OTHER; note = phosphorothioate linkage
  modified_base 2: mod_base = OTHER; note = 2'-fluorocytidine
  modified_base 2^3: mod_base = OTHER; note = phosphorothioate linkage
  modified_base 3: mod_base = OTHER; note = 2'-O-methyladenosine
  modified_base 4: mod_base = um
  modified_base 5: mod_base = gm
  modified_base 6: mod_base = OTHER; note = 2'-O-methyladenosine
  modified_base 7: mod_base = OTHER; note = 2'-deoxythymidine
  modified_base 8: mod_base = cm
  modified_base 9: mod_base = gm
  modified_base 10: mod_base = OTHER; note = 2'-O-methyladenosine
  modified_base 11: mod_base = um
  modified_base 12: mod_base = OTHER; note = 2'-deoxyguanosine
  modified_base 13: mod_base = um
  modified_base 14: mod_base = OTHER; note = 2'-fluoroadenosine
  modified_base 15: mod_base = gm
  modified_base 16: mod_base = OTHER; note = 2'-deoxyuridine
  modified_base 17: mod_base = um
  modified_base 18: mod_base = cm
  modified_base 19: mod_base = OTHER; note = 2'-O-methyladenosine
  modified_base 20: mod_base = OTHER; note = 2'-O-methyladenosine
  modified_base 20^21: mod_base = OTHER; note = phosphorothioate linkage
  modified_base 21: mod_base = gm
  source 1..21: mol_type = other RNA
tcatgatcgatgtagttcaag

SEQ ID NO: 545 - RNA, 21 nt, synthetic construct
  modified_base 7: mod_base = OTHER; note = thymine
  modified_base 1: mod_base = OTHER; note = 5'-cyclopropyl phosphonate-2'-O-methyluridine
  modified_base 1^2: mod_base = OTHER; note = phosphorothioate linkage
  modified_base 2: mod_base = OTHER; note = 2'-fluorocytidine
  modified_base 2^3: mod_base = OTHER; note = phosphorothioate linkage
  modified_base 3: mod_base = OTHER; note = 2'-O-methyladenosine
  modified_base 4: mod_base = um
  modified_base 5: mod_base = gm
  modified_base 6: mod_base = OTHER; note = 2'-O-methyladenosine
  modified_base 7: mod_base = OTHER; note = 2'-deoxythymidine
  modified_base 8: mod_base = cm
  modified_base 9: mod_base = gm
  modified_base 10: mod_base = OTHER; note = 2'-O-methyladenosine
  modified_base 11: mod_base = um
  modified_base 12: mod_base = OTHER; note = 2'-fluoroguanosine
  modified_base 13: mod_base = um
  modified_base 14: mod_base = OTHER; note = 2'-fluoroadenosine
  modified_base 15: mod_base = gm
  modified_base 16: mod_base = OTHER; note = 2'-deoxyuridine
  modified_base 17: mod_base = um
  modified_base 18: mod_base = cm
  modified_base 19: mod_base = OTHER; note = 2'-O-methyladenosine
  modified_base 20: mod_base = OTHER; note = 2'-O-methyladenosine
  modified_base 20^21: mod_base = OTHER; note = phosphorothioate linkage
  modified_base 21: mod_base = gm
  source 1..21: mol_type = other RNA
tcatgatcgatgtagttcaag

SEQ ID NO: 546 - RNA, 21 nt, synthetic construct
  modified_base 1: mod_base = OTHER; note = 5'-cyclopropyl phosphonate-2'-O-methyluridine
  modified_base 1^2: mod_base = OTHER; note = phosphorothioate linkage
  modified_base 2: mod_base = OTHER; note = 2'-fluorouridine
  modified_base 2^3: mod_base = OTHER; note = phosphorothioate linkage
  modified_base 3: mod_base = gm
  modified_base 3^4: mod_base = OTHER; note = phosphorothioate linkage
  modified_base 4: mod_base = um
  modified_base 5: mod_base = gm
  modified_base 6: mod_base = um
  modified_base 7: mod_base = OTHER; note = 2'-fluoroadenosine
  modified_base 8: mod_base = um
  modified_base 9: mod_base = gm
  modified_base 10: mod_base = OTHER; note = 2'-O-methyladenosine
  modified_base 11: mod_base = um
  modified_base 12: mod_base = OTHER; note = 2'-fluoroguanosine
  modified_base 13: mod_base = um
  modified_base 14: mod_base = OTHER; note = 2'-fluoroadenosine
  modified_base 15: mod_base = OTHER; note = 2'-O-methyladenosine
  modified_base 16: mod_base = OTHER; note = 2'-fluorocytidine
  modified_base 17: mod_base = gm
  modified_base 18: mod_base = um
  modified_base 19: mod_base = cm
  modified_base 20: mod_base = OTHER; note = 2'-O-methyladenosine
  modified_base 20^21: mod_base = OTHER; note = phosphorothioate linkage
  modified_base 21: mod_base = gm
  source 1..21: mol_type = other RNA
ttgtgtatgatgtaacgtcag

SEQ ID NO: 547 - RNA, 21 nt, synthetic construct
  modified_base 1: mod_base = OTHER; note = 5'-cyclopropyl phosphonate-2'-O-methyluridine
  modified_base 1^2: mod_base = OTHER; note = phosphorothioate linkage
  modified_base 2: mod_base = OTHER; note = 2'-fluorouridine
  modified_base 2^3: mod_base = OTHER; note = phosphorothioate linkage
  modified_base 3: mod_base = gm
  modified_base 3^4: mod_base = OTHER; note = phosphorothioate linkage
  modified_base 4: mod_base = um
  modified_base 5: mod_base = OTHER; note = 2'-fluoroguanosine
  modified_base 6: mod_base = um
  modified_base 7: mod_base = OTHER; note = 2'-O-methyladenosine
  modified_base 8: mod_base = um
  modified_base 9: mod_base = gm
  modified_base 10: mod_base = OTHER; note = 2'-O-methyladenosine
  modified_base 11: mod_base = um
  modified_base 12: mod_base = OTHER; note = 2'-fluoroguanosine
  modified_base 13: mod_base = um
  modified_base 14: mod_base = OTHER; note = 2'-fluoroadenosine
  modified_base 15: mod_base = OTHER; note = 2'-O-methyladenosine
  modified_base 16: mod_base = OTHER; note = 2'-fluorocytidine
  modified_base 17: mod_base = gm
  modified_base 18: mod_base = um
  modified_base 19: mod_base = cm
  modified_base 20: mod_base = OTHER; note = 2'-O-methyladenosine
  modified_base 20^21: mod_base = OTHER; note = phosphorothioate linkage
  modified_base 21: mod_base = gm
  source 1..21: mol_type = other RNA
ttgtgtatgatgtaacgtcag

SEQ ID NO: 548 - RNA, 21 nt, synthetic construct
  modified_base 1: mod_base = OTHER; note = 5'-cyclopropyl phosphonate-2'-O-methyluridine
  modified_base 1^2: mod_base = OTHER; note = phosphorothioate linkage
  modified_base 2: mod_base = OTHER; note = 2'-fluorouridine
  modified_base 2^3: mod_base = OTHER; note = phosphorothioate linkage
  modified_base 3: mod_base = gm
  modified_base 4: mod_base = um
  modified_base 5: mod_base = gm
  modified_base 6: mod_base = um
  modified_base 7: mod_base = OTHER; note = 2'-fluoroadenosine
  modified_base 8: mod_base = um
  modified_base 9: mod_base = gm
  modified_base 10: mod_base = OTHER; note = 2'-O-methyladenosine
  modified_base 11: mod_base = um
  modified_base 12: mod_base = OTHER; note = 2'-fluoroguanosine
  modified_base 13: mod_base = um
  modified_base 14: mod_base = OTHER; note = 2'-fluoroadenosine
  modified_base 15: mod_base = OTHER; note = 2'-O-methyladenosine
  modified_base 16: mod_base = OTHER; note = 2'-fluorocytidine
  modified_base 17: mod_base = gm
  modified_base 18: mod_base = um
  modified_base 19: mod_base = cm
  modified_base 20: mod_base = OTHER; note = 2'-O-methyladenosine
  modified_base 20^21: mod_base = OTHER; note = phosphorothioate linkage
  modified_base 21: mod_base = gm
  source 1..21: mol_type = other RNA
ttgtgtatgatgtaacgtcag

SEQ ID NO: 549 - RNA, 21 nt, synthetic construct
  modified_base 1: mod_base = OTHER; note = 5'-cyclopropyl phosphonate-2'-O-methyluridine
  modified_base 1^2: mod_base = OTHER; note = phosphorothioate linkage
  modified_base 2: mod_base = OTHER; note = 2'-fluorouridine
  modified_base 2^3: mod_base = OTHER; note = phosphorothioate linkage
  modified_base 3: mod_base = gm
  modified_base 4: mod_base = um
  modified_base 5: mod_base = gm
  modified_base 6: mod_base = um
  modified_base 7: mod_base = OTHER; note = 2'-fluoroadenosine
  modified_base 8: mod_base = um
  modified_base 9: mod_base = gm
  modified_base 10: mod_base = OTHER; note = 2'-O-methyladenosine
  modified_base 11: mod_base = um
  modified_base 12: mod_base = OTHER; note = 2'-fluoroguanosine
  modified_base 13: mod_base = um
  modified_base 14: mod_base = OTHER; note = 2'-fluoroadenosine
  modified_base 15: mod_base = OTHER; note = 2'-O-methyladenosine
  modified_base 16: mod_base = OTHER; note = 2'-fluorocytidine
  modified_base 17: mod_base = gm
  modified_base 18: mod_base = um
  modified_base 19: mod_base = cm
  modified_base 20: mod_base = OTHER; note = 2'-O-methyladenosine
  modified_base 20^21: mod_base = OTHER; note = phosphorodithioate linkage
  modified_base 21: mod_base = gm
  source 1..21: mol_type = other RNA
ttgtgtatgatgtaacgtcag

SEQ ID NO: 550 - RNA, 21 nt, synthetic construct
  modified_base 1: mod_base = OTHER; note = 5'-cyclopropyl phosphonate-2'-O-methyluridine
  modified_base 1^2: mod_base = OTHER; note = phosphorodithioate linkage
  modified_base 2: mod_base = OTHER; note = 2'-fluorouridine
  modified_base 2^3: mod_base = OTHER; note = phosphorothioate linkage
  modified_base 3: mod_base = gm
  modified_base 4: mod_base = um
  modified_base 5: mod_base = gm
  modified_base 6: mod_base = um
  modified_base 7: mod_base = OTHER; note = 2'-fluoroadenosine
  modified_base 8: mod_base = um
  modified_base 9: mod_base = gm
  modified_base 10: mod_base = OTHER; note = 2'-O-methyladenosine
  modified_base 11: mod_base = um
  modified_base 12: mod_base = OTHER; note = 2'-fluoroguanosine
  modified_base 13: mod_base = um
  modified_base 14: mod_base = OTHER; note = 2'-fluoroadenosine
  modified_base 15: mod_base = OTHER; note = 2'-O-methyladenosine
  modified_base 16: mod_base = OTHER; note = 2'-fluorocytidine
  modified_base 17: mod_base = gm
  modified_base 18: mod_base = um
  modified_base 19: mod_base = cm
  modified_base 20: mod_base = OTHER; note = 2'-O-methyladenosine
  modified_base 20^21: mod_base = OTHER; note = phosphorodithioate linkage
  modified_base 21: mod_base = gm
  source 1..21: mol_type = other RNA
ttgtgtatgatgtaacgtcag

SEQ ID NO: 551 - RNA, 21 nt, synthetic construct
  modified_base 1: mod_base = OTHER; note = 5'-cyclopropyl phosphonate-2'-O-methyluridine
  modified_base 1^2: mod_base = OTHER; note = phosphorothioate linkage
  modified_base 2: mod_base = OTHER; note = 2'-fluorouridine
  modified_base 2^3: mod_base = OTHER; note = phosphorothioate linkage
  modified_base 3: mod_base = gm
  modified_base 4: mod_base = um
  modified_base 5: mod_base = gm
  modified_base 6: mod_base = um
  modified_base 7: mod_base = OTHER; note = 2'-fluoroadenosine
  modified_base 8: mod_base = um
  modified_base 9: mod_base = gm
  modified_base 10: mod_base = OTHER; note = 2'-O-methyladenosine
  modified_base 11: mod_base = um
  modified_base 12: mod_base = gm
  modified_base 13: mod_base = um
  modified_base 14: mod_base = OTHER; note = 2'-fluoroadenosine
  modified_base 15: mod_base = OTHER; note = 2'-O-methyladenosine
  modified_base 16: mod_base = cm
  modified_base 17: mod_base = gm
  modified_base 18: mod_base = um
  modified_base 19: mod_base = cm
  modified_base 20: mod_base = OTHER; note = 2'-fluoroadenosine
  modified_base 20^21: mod_base = OTHER; note = phosphorothioate linkage
  modified_base 21: mod_base = gm
  source 1..21: mol_type = other RNA
ttgtgtatgatgtaacgtcag

SEQ ID NO: 552 - RNA, 21 nt, synthetic construct
  modified_base 2: mod_base = OTHER; note = thymine
  modified_base 1: mod_base = OTHER; note = 5'-cyclopropyl phosphonate-2'-O-methyluridine
  modified_base 1^2: mod_base = OTHER; note = phosphorothioate linkage
  modified_base 2: mod_base = OTHER; note = 2'-deoxythymidine
  modified_base 2^3: mod_base = OTHER; note = phosphorothioate linkage
  modified_base 3: mod_base = gm
  modified_base 4: mod_base = um
  modified_base 5: mod_base = gm
  modified_base 6: mod_base = um
  modified_base 7: mod_base = OTHER; note = 2'-deoxyadenosine
  modified_base 8: mod_base = um
  modified_base 9: mod_base = gm
  modified_base 10: mod_base = OTHER; note = 2'-O-methyladenosine
  modified_base 11: mod_base = um
  modified_base 12: mod_base = OTHER; note = 2'-deoxyguanosine
  modified_base 13: mod_base = um
  modified_base 14: mod_base = OTHER; note = 2'-fluoroadenosine
  modified_base 15: mod_base = OTHER; note = 2'-O-methyladenosine
  modified_base 16: mod_base = OTHER; note = 2'-deoxycytidine
  modified_base 17: mod_base = gm
  modified_base 18: mod_base = um
  modified_base 19: mod_base = cm
  modified_base 20: mod_base = OTHER; note = 2'-O-methyladenosine
  modified_base 20^21: mod_base = OTHER; note = phosphorothioate linkage
  modified_base 21: mod_base = gm
  source 1..21: mol_type = other RNA
ttgtgtatgatgtaacgtcag

SEQ ID NO: 553 - RNA, 21 nt, synthetic construct
  modified_base 1: mod_base = OTHER; note = 5'-cyclopropyl phosphonate-2'-O-methyluridine
  modified_base 1^2: mod_base = OTHER; note = phosphorothioate linkage
  modified_base 2: mod_base = OTHER; note = 2'-fluorouridine
  modified_base 2^3: mod_base = OTHER; note = phosphorothioate linkage
  modified_base 3: mod_base = gm
  modified_base 4: mod_base = um
  modified_base 5: mod_base = gm
  modified_base 6: mod_base = um
  modified_base 7: mod_base = OTHER; note = 2'-deoxyadenosine
  modified_base 8: mod_base = um
  modified_base 9: mod_base = gm
  modified_base 10: mod_base = OTHER; note = 2'-O-methyladenosine
  modified_base 11: mod_base = um
  modified_base 12: mod_base = OTHER; note = 2'-deoxyguanosine
  modified_base 13: mod_base = um
  modified_base 14: mod_base = OTHER; note = 2'-fluoroadenosine
  modified_base 15: mod_base = OTHER; note = 2'-O-methyladenosine
  modified_base 16: mod_base = OTHER; note = 2'-deoxycytidine
  modified_base 17: mod_base = gm
  modified_base 18: mod_base = um
  modified_base 19: mod_base = cm
  modified_base 20: mod_base = OTHER; note = 2'-O-methyladenosine
  modified_base 20^21: mod_base = OTHER; note = phosphorothioate linkage
  modified_base 21: mod_base = gm
  source 1..21: mol_type = other RNA
ttgtgtatgatgtaacgtcag

SEQ ID NO: 554 - RNA, 21 nt, synthetic construct
  modified_base 1: mod_base = OTHER; note = 5'-cyclopropyl phosphonate-2'-O-methyluridine
  modified_base 1^2: mod_base = OTHER; note = phosphorothioate linkage
  modified_base 2: mod_base = OTHER; note = 2'-fluorouridine
  modified_base 2^3: mod_base = OTHER; note = phosphorothioate linkage
  modified_base 3: mod_base = gm
  modified_base 4: mod_base = um
  modified_base 5: mod_base = gm
  modified_base 6: mod_base = um
  modified_base 7: mod_base = OTHER; note = 2'-deoxyadenosine
  modified_base 8: mod_base = um
  modified_base 9: mod_base = gm
  modified_base 10: mod_base = OTHER; note = 2'-O-methyladenosine
  modified_base 11: mod_base = um
  modified_base 12: mod_base = OTHER; note = 2'-fluoroguanosine
  modified_base 13: mod_base = um
  modified_base 14: mod_base = OTHER; note = 2'-fluoroadenosine
  modified_base 15: mod_base = OTHER; note = 2'-O-methyladenosine
  modified_base 16: mod_base = OTHER; note = 2'-deoxycytidine
  modified_base 17: mod_base = gm
  modified_base 18: mod_base = um
  modified_base 19: mod_base = cm
  modified_base 20: mod_base = OTHER; note = 2'-O-methyladenosine
  modified_base 20^21: mod_base = OTHER; note = phosphorothioate linkage
  modified_base 21: mod_base = gm
  source 1..21: mol_type = other RNA
ttgtgtatgatgtaacgtcag

SEQ ID NO: 555 - RNA, 21 nt, synthetic construct
  modified_base 1: mod_base = OTHER; note = 5'-cyclopropyl phosphonate-2'-O-methyluridine
  modified_base 1^2: mod_base = OTHER; note = phosphorothioate linkage
  modified_base 2: mod_base = OTHER; note = 2'-fluoroadenosine
  modified_base 2^3: mod_base = OTHER; note = phosphorothioate linkage
  modified_base 3: mod_base = cm
  modified_base 3^4: mod_base = OTHER; note = phosphorothioate linkage
  modified_base 4: mod_base = OTHER; note = 2'-O-methyladenosine
  modified_base 5: mod_base = OTHER; note = 2'-fluoroadenosine
  modified_base 6: mod_base = OTHER; note = 2'-O-methyladenosine
  modified_base 7: mod_base = gm
  modified_base 8: mod_base = cm
  modified_base 9: mod_base = cm
  modified_base 10: mod_base = OTHER; note = 2'-O-methyladenosine
  modified_base 11: mod_base = OTHER; note = 2'-O-methyladenosine
  modified_base 12: mod_base = OTHER; note = 2'-fluorouridine
  modified_base 13: mod_base = OTHER; note = 2'-O-methyladenosine
  modified_base 14: mod_base = OTHER; note = 2'-fluoroadenosine
  modified_base 15: mod_base = OTHER; note = 2'-O-methyladenosine
  modified_base 16: mod_base = OTHER; note = 2'-fluorocytidine
  modified_base 17: mod_base = OTHER; note = 2'-O-methyladenosine
  modified_base 18: mod_base = cm
  modified_base 19: mod_base = cm
  modified_base 20: mod_base = um
  modified_base 20^21: mod_base = OTHER; note = phosphorothioate linkage
  modified_base 21: mod_base = gm
  source 1..21: mol_type = other RNA
tacaaagccaataaacacctg

SEQ ID NO: 556 - RNA, 21 nt, synthetic construct
  modified_base 1: mod_base = OTHER; note = 5'-cyclopropyl phosphonate-2'-O-methyluridine
  modified_base 1^2: mod_base = OTHER; note = phosphorothioate linkage
  modified_base 2: mod_base = OTHER; note = 2'-fluoroadenosine
  modified_base 2^3: mod_base = OTHER; note = phosphorothioate linkage
  modified_base 3: mod_base = cm
  modified_base 3^4: mod_base = OTHER; note = phosphorothioate linkage
  modified_base 4: mod_base = OTHER; note = 2'-O-methyladenosine
  modified_base 5: mod_base = OTHER; note = 2'-O-methyladenosine
  modified_base 6: mod_base = OTHER; note = 2'-O-methyladenosine
  modified_base 7: mod_base = OTHER; note = 2'-fluoroguanosine
  modified_base 8: mod_base = cm
  modified_base 9: mod_base = cm
  modified_base 10: mod_base = OTHER; note = 2'-O-methyladenosine
  modified_base 11: mod_base = OTHER; note = 2'-O-methyladenosine
  modified_base 12: mod_base = OTHER; note = 2'-fluorouridine
  modified_base 13: mod_base = OTHER; note = 2'-O-methyladenosine
  modified_base 14: mod_base = OTHER; note = 2'-fluoroadenosine
  modified_base 15: mod_base = OTHER; note = 2'-O-methyladenosine
  modified_base 16: mod_base = OTHER; note = 2'-fluorocytidine
  modified_base 17: mod_base = OTHER; note = 2'-O-methyladenosine
  modified_base 18: mod_base = cm
  modified_base 19: mod_base = cm
  modified_base 20: mod_base = um
  modified_base 20^21: mod_base = OTHER; note = phosphorothioate linkage
  modified_base 21: mod_base = gm
  source 1..21: mol_type = other RNA
tacaaagccaataaacacctg

SEQ ID NO: 557 - RNA, 21 nt, synthetic construct
  modified_base 1: mod_base = OTHER; note = 5'-cyclopropyl phosphonate-2'-O-methyluridine
  modified_base 1^2: mod_base = OTHER; note = phosphorothioate linkage
  modified_base 2: mod_base = OTHER; note = 2'-fluoroadenosine
  modified_base 2^3: mod_base = OTHER; note = phosphorothioate linkage
  modified_base 3: mod_base = cm
  modified_base 4: mod_base = OTHER; note = 2'-O-methyladenosine
  modified_base 5: mod_base = OTHER; note = 2'-O-methyladenosine
  modified_base 6: mod_base = OTHER; note = 2'-O-methyladenosine
  modified_base 7: mod_base = OTHER; note = 2'-fluoroguanosine
  modified_base 8: mod_base = cm
  modified_base 9: mod_base = cm
  modified_base 10: mod_base = OTHER; note = 2'-O-methyladenosine
  modified_base 11: mod_base = OTHER; note = 2'-O-methyladenosine
  modified_base 12: mod_base = OTHER; note = 2'-fluorouridine
  modified_base 13: mod_base = OTHER; note = 2'-O-methyladenosine
  modified_base 14: mod_base = OTHER; note = 2'-fluoroadenosine
  modified_base 15: mod_base = OTHER; note = 2'-O-methyladenosine
  modified_base 16: mod_base = OTHER; note = 2'-fluorocytidine
  modified_base 17: mod_base = OTHER; note = 2'-O-methyladenosine
  modified_base 18: mod_base = cm
  modified_base 19: mod_base = cm
  modified_base 20: mod_base = um
  modified_base 20^21: mod_base = OTHER; note = phosphorothioate linkage
  modified_base 21: mod_base = gm
  source 1..21: mol_type = other RNA
tacaaagccaataaacacctg

SEQ ID NO: 558 - RNA, 21 nt, synthetic construct
  modified_base 1: mod_base = OTHER; note = 5'-cyclopropyl phosphonate-2'-O-methyluridine
  modified_base 1^2: mod_base = OTHER; note = phosphorothioate linkage
  modified_base 2: mod_base = OTHER; note = 2'-fluoroadenosine
  modified_base 2^3: mod_base = OTHER; note = phosphorothioate linkage
  modified_base 3: mod_base = cm
  modified_base 4: mod_base = OTHER; note = 2'-O-methyladenosine
  modified_base 5: mod_base = OTHER; note = 2'-O-methyladenosine
  modified_base 6: mod_base = OTHER; note = 2'-O-methyladenosine
  modified_base 7: mod_base = OTHER; note = 2'-fluoroguanosine
  modified_base 8: mod_base = cm
  modified_base 9: mod_base = cm
  modified_base 10: mod_base = OTHER; note = 2'-O-methyladenosine
  modified_base 11: mod_base = OTHER; note = 2'-O-methyladenosine
  modified_base 12: mod_base = OTHER; note = 2'-fluorouridine
  modified_base 13: mod_base = OTHER; note = 2'-O-methyladenosine
  modified_base 14: mod_base = OTHER; note = 2'-fluoroadenosine
  modified_base 15: mod_base = OTHER; note = 2'-O-methyladenosine
  modified_base 16: mod_base = OTHER; note = 2'-fluorocytidine
  modified_base 17: mod_base = OTHER; note = 2'-O-methyladenosine
  modified_base 18: mod_base = cm
  modified_base 19: mod_base = cm
  modified_base 20: mod_base = um
  modified_base 20^21: mod_base = OTHER; note = phosphorodithioate linkage
  modified_base 21: mod_base = gm
  source 1..21: mol_type = other RNA
tacaaagccaataaacacctg

SEQ ID NO: 559 - RNA, 21 nt, synthetic construct
  modified_base 1: mod_base = OTHER; note = 5'-cyclopropyl phosphonate-2'-O-methyluridine
  modified_base 1^2: mod_base = OTHER; note = phosphorodithioate linkage
  modified_base 2: mod_base = OTHER; note = 2'-fluoroadenosine
  modified_base 2^3: mod_base = OTHER; note = phosphorothioate linkage
  modified_base 3: mod_base = cm
  modified_base 4: mod_base = OTHER; note = 2'-O-methyladenosine
  modified_base 5: mod_base = OTHER; note = 2'-O-methyladenosine
  modified_base 6: mod_base = OTHER; note = 2'-O-methyladenosine
  modified_base 7: mod_base = OTHER; note = 2'-fluoroguanosine
  modified_base 8: mod_base = cm
  modified_base 9: mod_base = cm
  modified_base 10: mod_base = OTHER; note = 2'-O-methyladenosine
  modified_base 11: mod_base = OTHER; note = 2'-O-methyladenosine
  modified_base 12: mod_base = OTHER; note = 2'-fluorouridine
  modified_base 13: mod_base = OTHER; note = 2'-O-methyladenosine
  modified_base 14: mod_base = OTHER; note = 2'-fluoroadenosine
  modified_base 15: mod_base = OTHER; note = 2'-O-methyladenosine
  modified_base 16: mod_base = OTHER; note = 2'-fluorocytidine
  modified_base 17: mod_base = OTHER; note = 2'-O-methyladenosine
  modified_base 18: mod_base = cm
  modified_base 19: mod_base = cm
  modified_base 20: mod_base = um
  modified_base 20^21: mod_base = OTHER; note = phosphorodithioate linkage
  modified_base 21: mod_base = gm
  source 1..21: mol_type = other RNA
tacaaagccaataaacacctg

SEQ ID NO: 560 - RNA, 21 nt, synthetic construct
  modified_base 1: mod_base = OTHER; note = 5'-cyclopropyl phosphonate-2'-O-methyluridine
  modified_base 1^2: mod_base = OTHER; note = phosphorothioate linkage
  modified_base 2: mod_base = OTHER; note = 2'-fluoroadenosine
  modified_base 2^3: mod_base = OTHER; note = phosphorothioate linkage
  modified_base 3: mod_base = cm
  modified_base 4: mod_base = OTHER; note = 2'-O-methyladenosine
  modified_base 5: mod_base = OTHER; note = 2'-O-methyladenosine
  modified_base 6: mod_base = OTHER; note = 2'-O-methyladenosine
  modified_base 7: mod_base = OTHER; note = 2'-fluoroguanosine
  modified_base 8: mod_base = cm
  modified_base 9: mod_base = cm
  modified_base 10: mod_base = OTHER; note = 2'-O-methyladenosine
  modified_base 11: mod_base = OTHER; note = 2'-O-methyladenosine
  modified_base 12: mod_base = um
  modified_base 13: mod_base = OTHER; note = 2'-O-methyladenosine
  modified_base 14: mod_base = OTHER; note = 2'-fluoroadenosine
  modified_base 15: mod_base = OTHER; note = 2'-O-methyladenosine
  modified_base 16: mod_base = cm
  modified_base 17: mod_base = OTHER; note = 2'-O-methyladenosine
  modified_base 18: mod_base = cm
  modified_base 19: mod_base = cm
  modified_base 20: mod_base = OTHER; note = 2'-fluorouridine
  modified_base 20^21: mod_base = OTHER; note = phosphorothioate linkage
  modified_base 21: mod_base = gm
  source 1..21: mol_type = other RNA
tacaaagccaataaacacctg

SEQ ID NO: 561 - RNA, 21 nt, synthetic construct
  modified_base 12: mod_base = OTHER; note = thymine
  modified_base 1: mod_base = OTHER; note = 5'-cyclopropyl phosphonate-2'-O-methyluridine
  modified_base 1^2: mod_base = OTHER; note = phosphorothioate linkage
  modified_base 2: mod_base = OTHER; note = 2'-deoxyadenosine
  modified_base 2^3: mod_base = OTHER; note = phosphorothioate linkage
  modified_base 3: mod_base = cm
  modified_base 4: mod_base = OTHER; note = 2'-O-methyladenosine
  modified_base 5: mod_base = OTHER; note = 2'-O-methyladenosine
  modified_base 6: mod_base = OTHER; note = 2'-O-methyladenosine
  modified_base 7: mod_base = OTHER; note = 2'-deoxyguanosine
  modified_base 8: mod_base = cm
  modified_base 9: mod_base = cm
  modified_base 10: mod_base = OTHER; note = 2'-O-methyladenosine
  modified_base 11: mod_base = OTHER; note = 2'-O-methyladenosine
  modified_base 12: mod_base = OTHER; note = 2'-deoxythymidine
  modified_base 13: mod_base = OTHER; note = 2'-O-methyladenosine
  modified_base 14: mod_base = OTHER; note = 2'-fluoroadenosine
  modified_base 15: mod_base = OTHER; note = 2'-O-methyladenosine
  modified_base 16: mod_base = OTHER; note = 2'-deoxycytidine
  modified_base 17: mod_base = OTHER; note = 2'-O-methyladenosine
  modified_base 18: mod_base = cm
  modified_base 19: mod_base = cm
  modified_base 20: mod_base = um
  modified_base 20^21: mod_base = OTHER; note = phosphorothioate linkage
  modified_base 21: mod_base = gm
  source 1..21: mol_type = other RNA
tacaaagccaataaacacctg

SEQ ID NO: 562 - RNA, 21 nt, synthetic construct
  modified_base 12: mod_base = OTHER; note = thymine
  modified_base 1: mod_base = OTHER; note = 5'-cyclopropyl phosphonate-2'-O-methyluridine
  modified_base 1^2: mod_base = OTHER; note = phosphorothioate linkage
  modified_base 2: mod_base = OTHER; note = 2'-fluoroadenosine
  modified_base 2^3: mod_base = OTHER; note = phosphorothioate linkage
  modified_base 3: mod_base = cm
  modified_base 4: mod_base = OTHER; note = 2'-O-methyladenosine
  modified_base 5: mod_base = OTHER; note = 2'-O-methyladenosine
  modified_base 6: mod_base = OTHER; note = 2'-O-methyladenosine
  modified_base 7: mod_base = OTHER; note = 2'-deoxyguanosine
  modified_base 8: mod_base = cm
  modified_base 9: mod_base = cm
  modified_base 10: mod_base = OTHER; note = 2'-O-methyladenosine
  modified_base 11: mod_base = OTHER; note = 2'-O-methyladenosine
  modified_base 12: mod_base = OTHER; note = 2'-deoxythymidine
  modified_base 13: mod_base = OTHER; note = 2'-O-methyladenosine
  modified_base 14: mod_base = OTHER; note = 2'-fluoroadenosine
  modified_base 15: mod_base = OTHER; note = 2'-O-methyladenosine
  modified_base 16: mod_base = OTHER; note = 2'-deoxycytidine
  modified_base 17: mod_base = OTHER; note = 2'-O-methyladenosine
  modified_base 18: mod_base = cm
  modified_base 19: mod_base = cm
  modified_base 20: mod_base = um
  modified_base 20^21: mod_base = OTHER; note = phosphorothioate linkage
  modified_base 21: mod_base = gm
  source 1..21: mol_type = other RNA
tacaaagccaataaacacctg

SEQ ID NO: 563 - RNA, 21 nt, synthetic construct
  modified_base 1: mod_base = OTHER; note = 5'-cyclopropyl phosphonate-2'-O-methyluridine
  modified_base 1^2: mod_base = OTHER; note = phosphorothioate linkage
  modified_base 2: mod_base = OTHER; note = 2'-fluoroadenosine
  modified_base 2^3: mod_base = OTHER; note = phosphorothioate linkage
  modified_base 3: mod_base = cm
  modified_base 4: mod_base = OTHER; note = 2'-O-methyladenosine
  modified_base 5: mod_base = OTHER; note = 2'-O-methyladenosine
  modified_base 6: mod_base = OTHER; note = 2'-O-methyladenosine
  modified_base 7: mod_base = OTHER; note = 2'-deoxyguanosine
  modified_base 8: mod_base = cm
  modified_base 9: mod_base = cm
  modified_base 10: mod_base = OTHER; note = 2'-O-methyladenosine
  modified_base 11: mod_base = OTHER; note = 2'-O-methyladenosine
  modified_base 12: mod_base = OTHER; note = 2'-fluorouridine
  modified_base 13: mod_base = OTHER; note = 2'-O-methyladenosine
  modified_base 14: mod_base = OTHER; note = 2'-fluoroadenosine
  modified_base 15: mod_base = OTHER; note = 2'-O-methyladenosine
  modified_base 16: mod_base = OTHER; note = 2'-deoxycytidine
  modified_base 17: mod_base = OTHER; note = 2'-O-methyladenosine
  modified_base 18: mod_base = cm
  modified_base 19: mod_base = cm
  modified_base 20: mod_base = um
  modified_base 20^21: mod_base = OTHER; note = phosphorothioate linkage
  modified_base 21: mod_base = gm
  source 1..21: mol_type = other RNA
tacaaagccaataaacacctg

SEQ ID NO: 564 - RNA, 21 nt, synthetic construct
  modified_base 1: mod_base = cm
  modified_base 2: mod_base = um
  modified_base 3: mod_base = gm
  modified_base 4: mod_base = OTHER; note = 2'-O-methyladenosine
  modified_base 5: mod_base = cm
  modified_base 6: mod_base = gm
  modified_base 7: mod_base = um
  modified_base 8: mod_base = um
  modified_base 9: mod_base = OTHER; note = 2'-fluoroadenosine
  modified_base 10: mod_base = OTHER; note = 2'-fluorocytidine
  modified_base 11: mod_base = OTHER; note = 2'-fluoroadenosine
  modified_base 12: mod_base = um
  modified_base 13: mod_base = cm
  modified_base 14: mod_base = OTHER; note = 2'-O-methyladenosine
  modified_base 15: mod_base = um
  modified_base 16: mod_base = OTHER; note = 2'-O-methyladenosine
  modified_base 17: mod_base = cm
  modified_base 18: mod_base = OTHER; note = 2'-O-methyladenosine
  modified_base 19: mod_base = cm
  modified_base 20: mod_base = OTHER; note = 2'-O-methyladenosine
  modified_base 21: mod_base = OTHER; note = 2'-O-methyladenosine
  source 1..21: mol_type = other RNA
ctgacgttacatcatacacaa

SEQ ID NO: 565 - RNA, 21 nt, synthetic construct
  modified_base 1: mod_base = cm
  modified_base 2: mod_base = um
  modified_base 3: mod_base = um
  modified_base 4: mod_base = gm
  modified_base 5: mod_base = OTHER; note = 2'-O-methyladenosine
  modified_base 6: mod_base = OTHER; note = 2'-O-methyladenosine
  modified_base 7: mod_base = cm
  modified_base 8: mod_base = um
  modified_base 9: mod_base = OTHER; note = 2'-fluoroadenosine
  modified_base 10: mod_base = OTHER; note = 2'-fluorocytidine
  modified_base 11: mod_base = OTHER; note = 2'-fluoroadenosine
  modified_base 12: mod_base = um
  modified_base 13: mod_base = cm
  modified_base 14: mod_base = gm
  modified_base 15: mod_base = OTHER; note = 2'-O-methyladenosine
  modified_base 16: mod_base = um
  modified_base 17: mod_base = cm
  modified_base 18: mod_base = OTHER; note = 2'-O-methyladenosine
  modified_base 19: mod_base = um
  modified_base 20: mod_base = gm
  modified_base 21: mod_base = OTHER; note = 2'-O-methyladenosine
  source 1..21: mol_type = other RNA
cttgaactacatcgatcatga

SEQ ID NO: 566 - RNA, 21 nt, synthetic construct
  modified_base 1: mod_base = cm
  modified_base 2: mod_base = OTHER; note = 2'-O-methyladenosine
  modified_base 3: mod_base = gm
  modified_base 4: mod_base = gm
  modified_base 5: mod_base = um
  modified_base 6: mod_base = gm
  modified_base 7: mod_base = um
  modified_base 8: mod_base = um
  modified_base 9: mod_base = OTHER; note = 2'-fluorouridine
  modified_base 10: mod_base = OTHER; note = 2'-fluoroadenosine
  modified_base 11: mod_base = OTHER; note = 2'-fluorouridine
  modified_base 12: mod_base = um
  modified_base 13: mod_base = gm
  modified_base 14: mod_base = gm
  modified_base 15: mod_base = cm
  modified_base 16: mod_base = um
  modified_base 17: mod_base = um
  modified_base 18: mod_base = um
  modified_base 19: mod_base = gm
  modified_base 20: mod_base = um
  modified_base 21: mod_base = OTHER; note = 2'-O-methyladenosine
  source 1..21: mol_type = other RNA
caggtgtttattggctttgta

SEQ ID NO: 567 - RNA, 21 nt, synthetic construct
  modified_base 1: mod_base = cm
  modified_base 2: mod_base = um
  modified_base 3: mod_base = gm
  modified_base 4: mod_base = OTHER; note = 2'-O-methyladenosine
  modified_base 5: mod_base = cm
  modified_base 6: mod_base = gm
  modified_base 7: mod_base = um
  modified_base 8: mod_base = um
  modified_base 9: mod_base = OTHER; note = 2'-fluoroadenosine
  modified_base 10: mod_base = OTHER; note = 2'-fluorocytidine
  modified_base 11: mod_base = OTHER; note = 2'-fluoroadenosine
  modified_base 12: mod_base = um
  modified_base 13: mod_base = cm
  modified_base 14: mod_base = OTHER; note = 2'-O-methyladenosine
  modified_base 15: mod_base = um
  modified_base 16: mod_base = OTHER; note = 2'-O-methyladenosine
  modified_base 17: mod_base = cm
  modified_base 18: mod_base = OTHER; note = 2'-O-methyladenosine
  modified_base 19: mod_base = cm
  modified_base 20: mod_base = OTHER; note = 2'-O-methyladenosine
  modified_base 21: mod_base = OTHER; note = 2'-O-methyladenosine
  source 1..21: mol_type = other RNA
ctgacgttacatcatacacaa

SEQ ID NO: 568 - RNA, 21 nt, synthetic construct
  modified_base 1: mod_base = cm
  modified_base 2: mod_base = um
  modified_base 3: mod_base = um
  modified_base 4: mod_base = gm
  modified_base 5: mod_base = OTHER; note = 2'-O-methyladenosine
  modified_base 6: mod_base = OTHER; note = 2'-O-methyladenosine
  modified_base 7: mod_base = cm
  modified_base 8: mod_base = um
  modified_base 9: mod_base = OTHER; note = 2'-fluoroadenosine
  modified_base 10: mod_base = OTHER; note = 2'-fluorocytidine
  modified_base 11: mod_base = OTHER; note = 2'-fluoroadenosine
  modified_base 12: mod_base = um
  modified_base 13: mod_base = cm
  modified_base 14: mod_base = gm
  modified_base 15: mod_base = OTHER; note = 2'-O-methyladenosine
  modified_base 16: mod_base = um
  modified_base 17: mod_base = cm
  modified_base 18: mod_base = OTHER; note = 2'-O-methyladenosine
  modified_base 19: mod_base = um
  modified_base 20: mod_base = gm
  modified_base 21: mod_base = OTHER; note = 2'-O-methyladenosine
  source 1..21: mol_type = other RNA
cttgaactacatcgatcatga

SEQ ID NO: 569 - RNA, 21 nt, synthetic construct
  modified_base 1: mod_base = cm
  modified_base 2: mod_base = OTHER; note = 2'-O-methyladenosine
  modified_base 3: mod_base = gm
  modified_base 4: mod_base = gm
  modified_base 5: mod_base = um
  modified_base 6: mod_base = gm
  modified_base 7: mod_base = um
  modified_base 8: mod_base = um
  modified_base 9: mod_base = OTHER; note = 2'-fluorouridine
  modified_base 10: mod_base = OTHER; note = 2'-fluoroadenosine
  modified_base 11: mod_base = OTHER; note = 2'-fluorouridine
  modified_base 12: mod_base = um
  modified_base 13: mod_base = gm
  modified_base 14: mod_base = gm
  modified_base 15: mod_base = cm
  modified_base 16: mod_base = um
  modified_base 17: mod_base = um
  modified_base 18: mod_base = um
  modified_base 19: mod_base = gm
  modified_base 20: mod_base = um
  modified_base 21: mod_base = OTHER; note = 2'-O-methyladenosine
  source 1..21: mol_type = other RNA
caggtgtttattggctttgta

SEQ ID NO: 570 - RNA, 21 nt, synthetic construct
  modified_base 1: mod_base = OTHER; note = 2'-O-methyladenosine
  modified_base 2: mod_base = gm
  modified_base 3: mod_base = gm
  modified_base 4: mod_base = cm
  modified_base 5: mod_base = OTHER; note = 2'-O-methyladenosine
  modified_base 6: mod_base = OTHER; note = 2'-O-methyladenosine
  modified_base 7: mod_base = um
  modified_base 8: mod_base = um
  modified_base 9: mod_base = OTHER; note = 2'-fluorocytidine
  modified_base 10: mod_base = OTHER; note = 2'-fluoroadenosine
  modified_base 11: mod_base = OTHER; note = 2'-fluoroguanosine
  modified_base 12: mod_base = um
  modified_base 13: mod_base = cm
  modified_base 14: mod_base = um
  modified_base 15: mod_base = cm
  modified_base 16: mod_base = gm
  modified_base 17: mod_base = um
  modified_base 18: mod_base = um
  modified_base 19: mod_base = gm
  modified_base 20: mod_base = um
  modified_base 21: mod_base = OTHER; note = 2'-O-methyladenosine
  source 1..21: mol_type = other RNA
aggcaattcagtctcgttgta

SEQ ID NO: 571 - RNA, 21 nt, synthetic construct
  modified_base 1: mod_base = OTHER; note = 2'-O-methyladenosine
  modified_base 2: mod_base = gm
  modified_base 3: mod_base = gm
  modified_base 4: mod_base = cm
  modified_base 5: mod_base = OTHER; note = 2'-O-methyladenosine
  modified_base 6: mod_base = OTHER; note = 2'-O-methyladenosine
  modified_base 7: mod_base = um
  modified_base 8: mod_base = um
  modified_base 9: mod_base = OTHER; note = 2'-fluorocytidine
  modified_base 10: mod_base = OTHER; note = 2'-fluoroadenosine
  modified_base 11: mod_base = OTHER; note = 2'-fluoroguanosine
  modified_base 12: mod_base = um
  modified_base 13: mod_base = cm
  modified_base 14: mod_base = um
  modified_base 15: mod_base = cm
  modified_base 16: mod_base = gm
  modified_base 17: mod_base = um
  modified_base 18: mod_base = um
  modified_base 19: mod_base = gm
  modified_base 20: mod_base = um
  modified_base 21: mod_base = OTHER; note = 2'-O-methyladenosine
  source 1..21: mol_type = other RNA
aggcaattcagtctcgttgta

SEQ ID NO: 572 - RNA, 21 nt, synthetic construct
  modified_base 1: mod_base = cm
  modified_base 2: mod_base = um
  modified_base 3: mod_base = gm
  modified_base 4: mod_base = OTHER; note = 2'-O-methyladenosine
  modified_base 5: mod_base = cm
  modified_base 6: mod_base = gm
  modified_base 7: mod_base = um
  modified_base 8: mod_base = um
  modified_base 9: mod_base = OTHER; note = 2'-fluoroadenosine
  modified_base 10: mod_base = OTHER; note = 2'-fluorocytidine
  modified_base 11: mod_base = OTHER; note = 2'-fluoroadenosine
  modified_base 12: mod_base = um
  modified_base 13: mod_base = cm
  modified_base 14: mod_base = OTHER; note = 2'-O-methyladenosine
  modified_base 15: mod_base = um
  modified_base 16: mod_base = OTHER; note = 2'-O-methyladenosine
  modified_base 17: mod_base = cm
  modified_base 18: mod_base = OTHER; note = 2'-O-methyladenosine
  modified_base 19: mod_base = cm
  modified_base 20: mod_base = OTHER; note = 2'-O-methyladenosine
  modified_base 21: mod_base = OTHER; note = 2'-O-methyladenosine
  source 1..21: mol_type = other RNA
ctgacgttacatcatacacaa

SEQ ID NO: 573 - RNA, 21 nt, synthetic construct
  modified_base 1: mod_base = cm
  modified_base 2: mod_base = um
  modified_base 3: mod_base = um
  modified_base 4: mod_base = gm
  modified_base 5: mod_base = OTHER; note = 2'-O-methyladenosine
  modified_base 6: mod_base = OTHER; note = 2'-O-methyladenosine
  modified_base 7: mod_base = cm
  modified_base 8: mod_base = um
  modified_base 9: mod_base = OTHER; note = 2'-fluoroadenosine
  modified_base 10: mod_base = OTHER; note = 2'-fluorocytidine
  modified_base 11: mod_base = OTHER; note = 2'-fluoroadenosine
  modified_base 12: mod_base = um
  modified_base 13: mod_base = cm
  modified_base 14: mod_base = gm
  modified_base 15: mod_base = OTHER; note = 2'-O-methyladenosine
  modified_base 16: mod_base = um
  modified_base 17: mod_base = cm
  modified_base 18: mod_base = OTHER; note = 2'-O-methyladenosine
  modified_base 19: mod_base = um
  modified_base 20: mod_base = gm
  modified_base 21: mod_base = OTHER; note = 2'-O-methyladenosine
  source 1..21: mol_type = other RNA
cttgaactacatcgatcatga

SEQ ID NO: 574 - RNA, 21 nt, synthetic construct
  modified_base 1: mod_base = cm
  modified_base 2: mod_base = OTHER; note = 2'-O-methyladenosine
  modified_base 3: mod_base = gm
  modified_base 4: mod_base = gm
  modified_base 5: mod_base = um
  modified_base 6: mod_base = gm
  modified_base 7: mod_base = um
  modified_base 8: mod_base = um
  modified_base 9: mod_base = OTHER; note = 2'-fluorouridine
  modified_base 10: mod_base = OTHER; note = 2'-fluoroadenosine
  modified_base 11: mod_base = OTHER; note = 2'-fluorouridine
  modified_base 12: mod_base = um
  modified_base 13: mod_base = gm
  modified_base 14: mod_base = gm
  modified_base 15: mod_base = cm
  modified_base 16: mod_base = um
  modified_base 17: mod_base = um
  modified_base 18: mod_base = um
  modified_base 19: mod_base = gm
  modified_base 20: mod_base = um
  modified_base 21: mod_base = OTHER; note = 2'-O-methyladenosine
  source 1..21: mol_type = other RNA
caggtgtttattggctttgta

SEQ ID NO: 575 - RNA, 21 nt, synthetic construct
  modified_base 1: mod_base = OTHER; note = 2'-O-methyladenosine
  modified_base 2: mod_base = gm
  modified_base 3: mod_base = gm
  modified_base 4: mod_base = cm
  modified_base 5: mod_base = OTHER; note = 2'-O-methyladenosine
  modified_base 6: mod_base = OTHER; note = 2'-O-methyladenosine
  modified_base 7: mod_base = um
  modified_base 8: mod_base = um
  modified_base 9: mod_base = OTHER; note = 2'-fluorocytidine
  modified_base 10: mod_base = OTHER; note = 2'-fluoroadenosine
  modified_base 11: mod_base = OTHER; note = 2'-fluoroguanosine
  modified_base 12: mod_base = um
  modified_base 13: mod_base = cm
  modified_base 14: mod_base = um
  modified_base 15: mod_base = cm
  modified_base 16: mod_base = gm
  modified_base 17: mod_base = um
  modified_base 18: mod_base = um
  modified_base 19: mod_base = gm
  modified_base 20: mod_base = um
  modified_base 21: mod_base = OTHER; note = 2'-O-methyladenosine
  source 1..21: mol_type = other RNA
aggcaattcagtctcgttgta

SEQ ID NO: 576 - RNA, 21 nt, synthetic construct
  modified_base 1: mod_base = gm
  modified_base 1^2: mod_base = OTHER; note = phosphorothioate linkage
  modified_base 2: mod_base = cm
  modified_base 2^3: mod_base = OTHER; note = phosphorothioate linkage
  modified_base 3: mod_base = gm
  modified_base 4: mod_base = OTHER; note = 2'-O-methyladenosine
  modified_base 5: mod_base = cm
  modified_base 6: mod_base = OTHER; note = 2'-O-hexadecanylcytidine
  modified_base 7: mod_base = OTHER; note = 2'-fluorocytidine
  modified_base 8: mod_base = um
  modified_base 9: mod_base = OTHER; note = 2'-fluoroguanosine
  modified_base 10: mod_base = OTHER; note = 2'-fluoroguanosine
  modified_base 11: mod_base = OTHER; note = 2'-fluoroadenosine
  modified_base 12: mod_base = OTHER; note = 2'-O-methyladenosine
  modified_base 13: mod_base = OTHER; note = 2'-O-methyladenosine
  modified_base 14: mod_base = OTHER; note = 2'-O-methyladenosine
  modified_base 15: mod_base = gm
  modified_base 16: mod_base = cm
  modified_base 17: mod_base = um
  modified_base 18: mod_base = gm
  modified_base 19: mod_base = OTHER; note = 2'-O-methyladenosine
  modified_base 19^20: mod_base = OTHER; note = phosphorothioate linkage
  modified_base 20: mod_base = um
  modified_base 20^21: mod_base = OTHER; note = phosphorothioate linkage
  modified_base 21: mod_base = OTHER; note = 2'-O-methyladenosine
  source 1..21: mol_type = other RNA
gcgaccctggaaaagctgata

SEQ ID NO: 577 - RNA, 21 nt, synthetic construct
  modified_base 1: mod_base = cm
  modified_base 2: mod_base = um
  modified_base 3: mod_base = gm
  modified_base 4: mod_base = OTHER; note = 2'-O-methyladenosine
  modified_base 5: mod_base = um
  modified_base 6: mod_base = gm
  modified_base 7: mod_base = OTHER; note = 2'-O-methyladenosine
  modified_base 8: mod_base = OTHER; note = 2'-O-methyladenosine
  modified_base 9: mod_base = OTHER; note = 2'-fluoroguanosine
  modified_base 10: mod_base = OTHER; note = 2'-fluoroguanosine
  modified_base 11: mod_base = OTHER; note = 2'-fluorocytidine
  modified_base 12: mod_base = um
  modified_base 13: mod_base = um
  modified_base 14: mod_base = um
  modified_base 15: mod_base = cm
  modified_base 16: mod_base = gm
  modified_base 17: mod_base = OTHER; note = 2'-O-methyladenosine
  modified_base 18: mod_base = gm
  modified_base 19: mod_base = um
  modified_base 20: mod_base = cm
  modified_base 21: mod_base = OTHER; note = 2'-O-methyladenosine
  source 1..21: mol_type = other RNA
ctgatgaaggctttcgagtca

SEQ ID NO: 578 - RNA, 21 nt, synthetic construct
  modified_base 1: mod_base = cm
  modified_base 2: mod_base = um
  modified_base 3: mod_base = gm
  modified_base 4: mod_base = gm
  modified_base 5: mod_base = OTHER; note = 2'-O-methyladenosine
  modified_base 6: mod_base = gm
  modified_base 7: mod_base = cm
  modified_base 8: mod_base = OTHER; note = 2'-O-methyladenosine
  modified_base 9: mod_base = OTHER; note = 2'-fluoroadenosine
  modified_base 10: mod_base = OTHER; note = 2'-fluoroguanosine
  modified_base 11: mod_base = OTHER; note = 2'-fluorouridine
  modified_base 12: mod_base = um
  modified_base 13: mod_base = gm
  modified_base 14: mod_base = OTHER; note = 2'-O-methyladenosine
  modified_base 15: mod_base = OTHER; note = 2'-O-methyladenosine
  modified_base 16: mod_base = um
  modified_base 17: mod_base = gm
  modified_base 18: mod_base = OTHER; note = 2'-O-methyladenosine
  modified_base 19: mod_base = um
  modified_base 20: mod_base = cm
  modified_base 21: mod_base = OTHER; note = 2'-O-methyladenosine
  source 1..21: mol_type = other RNA
ctggagcaagttgaatgatca

SEQ ID NO: 579 - RNA, 21 nt, synthetic construct
  modified_base 1: mod_base = cm
  modified_base 2: mod_base = um
  modified_base 3: mod_base = gm
  modified_base 4: mod_base = gm
  modified_base 5: mod_base = OTHER; note = 2'-O-methyladenosine
  modified_base 6: mod_base = gm
  modified_base 7: mod_base = cm
  modified_base 8: mod_base = OTHER; note = 2'-O-methyladenosine
  modified_base 9: mod_base = OTHER; note = 2'-fluoroadenosine
  modified_base 10: mod_base = gm
  modified_base 11: mod_base = OTHER; note = 2'-fluorouridine
  modified_base 12: mod_base = um
  modified_base 13: mod_base = gm
  modified_base 14: mod_base = OTHER; note = 2'-O-methyladenosine
  modified_base 15: mod_base = OTHER; note = 2'-O-methyladenosine
  modified_base 16: mod_base = um
  modified_base 17: mod_base = gm
  modified_base 18: mod_base = OTHER; note = 2'-O-methyladenosine
  modified_base 19: mod_base = um
  modified_base 20: mod_base = cm
  modified_base 21: mod_base = um
  source 1..21: mol_type = other RNA
ctggagcaagttgaatgatct

SEQ ID NO: 580 - RNA, 21 nt, synthetic construct
  modified_base 1: mod_base = cm
  modified_base 2: mod_base = um
  modified_base 3: mod_base = gm
  modified_base 4: mod_base = gm
  modified_base 5: mod_base = OTHER; note = 2'-O-methyladenosine
  modified_base 6: mod_base = gm
  modified_base 7: mod_base = cm
  modified_base 8: mod_base = OTHER; note = 2'-O-methyladenosine
  modified_base 9: mod_base = OTHER; note = 2'-fluoroadenosine
  modified_base 10: mod_base = gm
  modified_base 11: mod_base = OTHER; note = 2'-fluorouridine
  modified_base 12: mod_base = OTHER; note = 2'-fluorouridine
  modified_base 13: mod_base = gm
  modified_base 14: mod_base = OTHER; note = 2'-O-methyladenosine
  modified_base 15: mod_base = OTHER; note = 2'-O-methyladenosine
  modified_base 16: mod_base = um
  modified_base 17: mod_base = gm
  modified_base 18: mod_base = OTHER; note = 2'-O-methyladenosine
  modified_base 19: mod_base = um
  modified_base 20: mod_base = cm
  modified_base 21: mod_base = um
  source 1..21: mol_type = other RNA
ctggagcaagttgaatgatct

SEQ ID NO: 581 - RNA, 21 nt, synthetic construct
  modified_base 1: mod_base = cm
  modified_base 2: mod_base = um
  modified_base 3: mod_base = gm
  modified_base 4: mod_base = gm
  modified_base 5: mod_base = OTHER; note = 2'-O-methyladenosine
  modified_base 6: mod_base = gm
  modified_base 7: mod_base = cm
  modified_base 8: mod_base = OTHER; note = 2'-O-methyladenosine
  modified_base 9: mod_base = OTHER; note = 2'-fluoroadenosine
  modified_base 10: mod_base = gm
  modified_base 11: mod_base = OTHER; note = 2'-fluorouridine
  modified_base 12: mod_base = um
  modified_base 13: mod_base = OTHER; note = 2'-fluoroguanosine
  modified_base 14: mod_base = OTHER; note = 2'-O-methyladenosine
  modified_base 15: mod_base = OTHER; note = 2'-O-methyladenosine
  modified_base 16: mod_base = um
  modified_base 17: mod_base = gm
  modified_base 18: mod_base = OTHER; note = 2'-O-methyladenosine
  modified_base 19: mod_base = um
  modified_base 20: mod_base = cm
  modified_base 21: mod_base = um
  source 1..21: mol_type = other RNA
ctggagcaagttgaatgatct

SEQ ID NO: 582 - RNA, 21 nt, synthetic construct
  modified_base 1: mod_base = cm
  modified_base 2: mod_base = um
  modified_base 3: mod_base = gm
  modified_base 4: mod_base = gm
  modified_base 5: mod_base = OTHER; note = 2'-O-methyladenosine
  modified_base 6: mod_base = gm
  modified_base 7: mod_base = cm
  modified_base 8: mod_base = OTHER; note = 2'-O-methyladenosine
  modified_base 9: mod_base = OTHER; note = 2'-fluoroadenosine
  modified_base 10: mod_base = OTHER; note = 2'-fluoroguanosine
  modified_base 11: mod_base = OTHER; note = 2'-fluorouridine
  modified_base 12: mod_base = um
  modified_base 13: mod_base = gm
  modified_base 14: mod_base = OTHER; note = 2'-O-methyladenosine
  modified_base 15: mod_base = OTHER; note = 2'-O-methyladenosine
  modified_base 16: mod_base = um
  modified_base 17: mod_base = gm
  modified_base 18: mod_base = OTHER; note = 2'-O-methyladenosine
  modified_base 19: mod_base = um
  modified_base 20: mod_base = um
  modified_base 21: mod_base = um
  source 1..21: mol_type = other RNA
ctggagcaagttgaatgattt

SEQ ID NO: 583 - RNA, 21 nt, synthetic construct
  modified_base 1: mod_base = OTHER; note = 2'-O-methyladenosine
  modified_base 2: mod_base = gm
  modified_base 3: mod_base = gm
  modified_base 4: mod_base = cm
  modified_base 5: mod_base = OTHER; note = 2'-O-methyladenosine
  modified_base 6: mod_base = OTHER; note = 2'-O-methyladenosine
  modified_base 7: mod_base = um
  modified_base 8: mod_base = um
  modified_base 9: mod_base = OTHER; note = 2'-fluorocytidine
  modified_base 10: mod_base = OTHER; note = 2'-O-methyladenosine
  modified_base 11: mod_base = OTHER; note = 2'-fluoroguanosine
  modified_base 12: mod_base = um
  modified_base 13: mod_base = cm
  modified_base 14: mod_base = um
  modified_base 15: mod_base = cm
  modified_base 16: mod_base = gm
  modified_base 17: mod_base = um
  modified_base 18: mod_base = um
  modified_base 19: mod_base = gm
  modified_base 20: mod_base = um
  modified_base 21: mod_base = OTHER; note = 2'-O-methyladenosine
  source 1..21: mol_type = other RNA
aggcaattcagtctcgttgta

SEQ ID NO: 584 - RNA, 21 nt, synthetic construct
  modified_base 1: mod_base = OTHER; note = 2'-O-methyladenosine
  modified_base 2: mod_base = gm
  modified_base 3: mod_base = gm
  modified_base 4: mod_base = cm
  modified_base 5: mod_base = OTHER; note = 2'-O-methyladenosine
  modified_base 6: mod_base = OTHER; note = 2'-O-methyladenosine
  modified_base 7: mod_base = um
  modified_base 8: mod_base = um
  modified_base 9: mod_base = OTHER; note = 2'-fluorocytidine
  modified_base 10: mod_base = OTHER; note = 2'-O-methyladenosine
  modified_base 11: mod_base = OTHER; note = 2'-fluoroguanosine
  modified_base 12: mod_base = OTHER; note = 2'-fluorouridine
  modified_base 13: mod_base = cm
  modified_base 14: mod_base = um
  modified_base 15: mod_base = cm
  modified_base 16: mod_base = gm
  modified_base 17: mod_base = um
  modified_base 18: mod_base = um
  modified_base 19: mod_base = gm
  modified_base 20: mod_base = um
  modified_base 21: mod_base = OTHER; note = 2'-O-methyladenosine
  source 1..21: mol_type = other RNA
aggcaattcagtctcgttgta

SEQ ID NO: 585 - RNA, 21 nt, synthetic construct
  modified_base 1: mod_base = OTHER; note = 2'-O-methyladenosine
  modified_base 2: mod_base = gm
  modified_base 3: mod_base = gm
  modified_base 4: mod_base = cm
  modified_base 5: mod_base = OTHER; note = 2'-O-methyladenosine
  modified_base 6: mod_base = OTHER; note = 2'-O-methyladenosine
  modified_base 7: mod_base = um
  modified_base 8: mod_base = um
  modified_base 9: mod_base = OTHER; note = 2'-fluorocytidine
  modified_base 10: mod_base = OTHER; note = 2'-O-methyladenosine
  modified_base 11: mod_base = OTHER; note = 2'-fluoroguanosine
  modified_base 12: mod_base = um
  modified_base 13: mod_base = OTHER; note = 2'-fluorocytidine
  modified_base 14: mod_base = um
  modified_base 15: mod_base = cm
  modified_base 16: mod_base = gm
  modified_base 17: mod_base = um
  modified_base 18: mod_base = um
  modified_base 19: mod_base = gm
  modified_base 20: mod_base = um
  modified_base 21: mod_base = OTHER; note = 2'-O-methyladenosine
  source 1..21: mol_type = other RNA
aggcaattcagtctcgttgta

SEQ ID NO: 586 - RNA, 21 nt, synthetic construct
  modified_base 1: mod_base = OTHER; note = 2'-O-methyladenosine
  modified_base 2: mod_base = gm
  modified_base 3: mod_base = gm
  modified_base 4: mod_base = cm
  modified_base 5: mod_base = OTHER; note = 2'-O-methyladenosine
  modified_base 6: mod_base = OTHER; note = 2'-O-methyladenosine
  modified_base 7: mod_base = um
  modified_base 8: mod_base = um
  modified_base 9: mod_base = OTHER; note = 2'-fluorocytidine
  modified_base 10: mod_base = OTHER; note = 2'-fluoroadenosine
  modified_base 11: mod_base = OTHER; note = 2'-fluoroguanosine
  modified_base 12: mod_base = um
  modified_base 13: mod_base = cm
  modified_base 14: mod_base = um
  modified_base 15: mod_base = um
  modified_base 16: mod_base = gm
  modified_base 17: mod_base = um
  modified_base 18: mod_base = um
  modified_base 19: mod_base = gm
  modified_base 20: mod_base = um
  modified_base 21: mod_base = OTHER; note = 2'-O-methyladenosine
  source 1..21: mol_type = other RNA
aggcaattcagtcttgttgta

SEQ ID NO: 587 - RNA, 21 nt, synthetic construct
  modified_base 1: mod_base = OTHER; note = 2'-O-methyladenosine
  modified_base 2: mod_base = gm
  modified_base 3: mod_base = gm
  modified_base 4: mod_base = um
  modified_base 5: mod_base = OTHER; note = 2'-O-methyladenosine
  modified_base 6: mod_base = OTHER; note = 2'-O-methyladenosine
  modified_base 7: mod_base = um
  modified_base 8: mod_base = um
  modified_base 9: mod_base = OTHER; note = 2'-fluorocytidine
  modified_base 10: mod_base = OTHER; note = 2'-fluoroadenosine
  modified_base 11: mod_base = OTHER; note = 2'-fluoroguanosine
  modified_base 12: mod_base = um
  modified_base 13: mod_base = cm
  modified_base 14: mod_base = um
  modified_base 15: mod_base = cm
  modified_base 16: mod_base = gm
  modified_base 17: mod_base = um
  modified_base 18: mod_base = um
  modified_base 19: mod_base = gm
  modified_base 20: mod_base = um
  modified_base 21: mod_base = OTHER; note = 2'-O-methyladenosine
  source 1..21: mol_type = other RNA
aggtaattcagtctcgttgta

SEQ ID NO: 588 - RNA, 21 nt, synthetic construct
  modified_base 1: mod_base = OTHER; note = 2'-O-methyladenosine
  modified_base 2: mod_base = gm
  modified_base 3: mod_base = gm
  modified_base 4: mod_base = cm
  modified_base 5: mod_base = OTHER; note = 2'-O-methyladenosine
  modified_base 6: mod_base = OTHER; note = 2'-O-methyladenosine
  modified_base 7: mod_base = um
  modified_base 8: mod_base = um
  modified_base 9: mod_base = OTHER; note = 2'-fluorocytidine
  modified_base 10: mod_base = OTHER; note = 2'-fluoroadenosine
  modified_base 11: mod_base = OTHER; note = 2'-fluoroguanosine
  modified_base 12: mod_base = um
  modified_base 13: mod_base = um
  modified_base 14: mod_base = um
  modified_base 15: mod_base = cm
  modified_base 16: mod_base = gm
  modified_base 17: mod_base = um
  modified_base 18: mod_base = um
  modified_base 19: mod_base = gm
  modified_base 20: mod_base = um
  modified_base 21: mod_base = OTHER; note = 2'-O-methyladenosine
  source 1..21: mol_type = other RNA
aggcaattcagtttcgttgta

SEQ ID NO: 589 - RNA, 21 nt, synthetic construct
  modified_base 1: mod_base = cm
  modified_base 2: mod_base = cm
  modified_base 3: mod_base = OTHER; note = 2'-O-methyladenosine
  modified_base 4: mod_base = um
  modified_base 5: mod_base = gm
  modified_base 6: mod_base = cm
  modified_base 7: mod_base = OTHER; note = 2'-O-methyladenosine
  modified_base 8: mod_base = OTHER; note = 2'-O-methyladenosine
  modified_base 9: mod_base = OTHER; note = 2'-fluoroguanosine
  modified_base 10: mod_base = OTHER; note = 2'-O-methyladenosine
  modified_base 11: mod_base = OTHER; note = 2'-fluorocytidine
  modified_base 12: mod_base = um
  modified_base 13: mod_base = cm
  modified_base 14: mod_base = OTHER; note = 2'-O-methyladenosine
  modified_base 15: mod_base = cm
  modified_base 16: mod_base = um
  modified_base 17: mod_base = um
  modified_base 18: mod_base = OTHER; note = 2'-O-methyladenosine
  modified_base 19: mod_base = gm
  modified_base 20: mod_base = um
  modified_base 21: mod_base = OTHER; note = 2'-O-methyladenosine
  source 1..21: mol_type = other RNA
ccatgcaagactcacttagta

SEQ ID NO: 590 - RNA, 21 nt, synthetic construct
  modified_base 1: mod_base = cm
  modified_base 2: mod_base = cm
  modified_base 3: mod_base = OTHER; note = 2'-O-methyladenosine
  modified_base 4: mod_base = um
  modified_base 5: mod_base = gm
  modified_base 6: mod_base = cm
  modified_base 7: mod_base = OTHER; note = 2'-O-methyladenosine
  modified_base 8: mod_base = OTHER; note = 2'-O-methyladenosine
  modified_base 9: mod_base = OTHER; note = 2'-fluoroguanosine
  modified_base 10: mod_base = OTHER; note = 2'-O-methyladenosine
  modified_base 11: mod_base = OTHER; note = 2'-fluorocytidine
  modified_base 12: mod_base = OTHER; note = 2'-fluorouridine
  modified_base 13: mod_base = cm
  modified_base 14: mod_base = OTHER; note = 2'-O-methyladenosine
  modified_base 15: mod_base = cm
  modified_base 16: mod_base = um
  modified_base 17: mod_base = um
  modified_base 18: mod_base = OTHER; note = 2'-O-methyladenosine
  modified_base 19: mod_base = gm
  modified_base 20: mod_base = um
  modified_base 21: mod_base = OTHER; note = 2'-O-methyladenosine
  source 1..21: mol_type = other RNA
ccatgcaagactcacttagta

SEQ ID NO: 591 - RNA, 21 nt, synthetic construct
  modified_base 1: mod_base = cm
  modified_base 2: mod_base = cm
  modified_base 3: mod_base = OTHER; note = 2'-O-methyladenosine
  modified_base 4: mod_base = um
  modified_base 5: mod_base = gm
  modified_base 6: mod_base = cm
  modified_base 7: mod_base = OTHER; note = 2'-O-methyladenosine
  modified_base 8: mod_base = OTHER; note = 2'-O-methyladenosine
  modified_base 9: mod_base = OTHER; note = 2'-fluoroguanosine
  modified_base 10: mod_base = OTHER; note = 2'-O-methyladenosine
  modified_base 11: mod_base = OTHER; note = 2'-fluorocytidine
  modified_base 12: mod_base = um
  modified_base 13: mod_base = OTHER; note = 2'-fluorocytidine
  modified_base 14: mod_base = OTHER; note = 2'-O-methyladenosine
  modified_base 15: mod_base = cm
  modified_base 16: mod_base = um
  modified_base 17: mod_base = um
  modified_base 18: mod_base = OTHER; note = 2'-O-methyladenosine
  modified_base 19: mod_base = gm
  modified_base 20: mod_base = um
  modified_base 21: mod_base = OTHER; note = 2'-O-methyladenosine
  source 1..21: mol_type = other RNA
ccatgcaagactcacttagta

SEQ ID NO: 592 - RNA, 21 nt, synthetic construct
  modified_base 1: mod_base = cm
  modified_base 2: mod_base = cm
  modified_base 3: mod_base = OTHER; note = 2'-O-methyladenosine
  modified_base 4: mod_base = um
  modified_base 5: mod_base = gm
  modified_base 6: mod_base = um
  modified_base 7: mod_base = OTHER; note = 2'-O-methyladenosine
  modified_base 8: mod_base = OTHER; note = 2'-O-methyladenosine
  modified_base 9: mod_base = OTHER; note = 2'-fluoroguanosine
  modified_base 10: mod_base = OTHER; note = 2'-fluoroadenosine
  modified_base 11: mod_base = OTHER; note = 2'-fluorocytidine
  modified_base 12: mod_base = um
  modified_base 13: mod_base = cm
  modified_base 14: mod_base = OTHER; note = 2'-O-methyladenosine
  modified_base 15: mod_base = cm
  modified_base 16: mod_base = um
  modified_base 17: mod_base = um
  modified_base 18: mod_base = OTHER; note = 2'-O-methyladenosine
  modified_base 19: mod_base = gm
  modified_base 20: mod_base = um
  modified_base 21: mod_base = OTHER; note = 2'-O-methyladenosine
  source 1..21: mol_type = other RNA
ccatgtaagactcacttagta

SEQ ID NO: 593 - RNA, 21 nt, synthetic construct
  modified_base 1: mod_base = cm
  modified_base 2: mod_base = cm
  modified_base 3: mod_base = OTHER; note = 2'-O-methyladenosine
  modified_base 4: mod_base = um
  modified_base 5: mod_base = gm
  modified_base 6: mod_base = cm
  modified_base 7: mod_base = OTHER; note = 2'-O-methyladenosine
  modified_base 8: mod_base = OTHER; note = 2'-O-methyladenosine
  modified_base 9: mod_base = OTHER; note = 2'-fluoroguanosine
  modified_base 10: mod_base = OTHER; note = 2'-fluoroadenosine
  modified_base 11: mod_base = OTHER; note = 2'-fluorocytidine
  modified_base 12: mod_base = um
  modified_base 13: mod_base = cm
  modified_base 14: mod_base = OTHER; note = 2'-O-methyladenosine
  modified_base 15: mod_base = um
  modified_base 16: mod_base = um
  modified_base 17: mod_base = um
  modified_base 18: mod_base = OTHER; note = 2'-O-methyladenosine
  modified_base 19: mod_base = gm
  modified_base 20: mod_base = um
  modified_base 21: mod_base = OTHER; note = 2'-O-methyladenosine
  source 1..21: mol_type = other RNA
ccatgcaagactcatttagta

SEQ ID NO: 594 - RNA, 21 nt, synthetic construct
  modified_base 1: mod_base = cm
  modified_base 2: mod_base = cm
  modified_base 3: mod_base = OTHER; note = 2'-O-methyladenosine
  modified_base 4: mod_base = um
  modified_base 5: mod_base = gm
  modified_base 6: mod_base = cm
  modified_base 7: mod_base = OTHER; note = 2'-O-methyladenosine
  modified_base 8: mod_base = OTHER; note = 2'-O-methyladenosine
  modified_base 9: mod_base = OTHER; note = 2'-fluoroguanosine
  modified_base 10: mod_base = OTHER; note = 2'-fluoroadenosine
  modified_base 11: mod_base = OTHER; note = 2'-fluorocytidine
  modified_base 12: mod_base = um
  modified_base 13: mod_base = um
  modified_base 14: mod_base = OTHER; note = 2'-O-methyladenosine
  modified_base 15: mod_base = cm
  modified_base 16: mod_base = um
  modified_base 17: mod_base = um
  modified_base 18: mod_base = OTHER; note = 2'-O-methyladenosine
  modified_base 19: mod_base = gm
  modified_base 20: mod_base = um
  modified_base 21: mod_base = OTHER; note = 2'-O-methyladenosine
  source 1..21: mol_type = other RNA
ccatgcaagacttacttagta

SEQ ID NO: 595 - RNA, 21 nt, synthetic construct
  modified_base 1: mod_base = cm
  modified_base 2: mod_base = um
  modified_base 3: mod_base = gm
  modified_base 4: mod_base = OTHER; note = 2'-O-methyladenosine
  modified_base 5: mod_base = um
  modified_base 6: mod_base = gm
  modified_base 7: mod_base = OTHER; note = 2'-O-methyladenosine
  modified_base 8: mod_base = OTHER; note = 2'-O-methyladenosine
  modified_base 9: mod_base = OTHER; note = 2'-fluoroguanosine
  modified_base 10: mod_base = OTHER; note = 2'-fluoroguanosine
  modified_base 11: mod_base = OTHER; note = 2'-fluorocytidine
  modified_base 12: mod_base = cm
  modified_base 13: mod_base = um
  modified_base 14: mod_base = um
  modified_base 15: mod_base = cm
  modified_base 16: mod_base = gm
  modified_base 17: mod_base = OTHER; note = 2'-O-methyladenosine
  modified_base 18: mod_base = gm
  modified_base 19: mod_base = um
  modified_base 20: mod_base = cm
  modified_base 21: mod_base = OTHER; note = 2'-O-methyladenosine
  source 1..21: mol_type = other RNA
ctgatgaaggccttcgagtca

SEQ ID NO: 596 - RNA, 21 nt, synthetic construct
  modified_base 1: mod_base = cm
  modified_base 2: mod_base = cm
  modified_base 3: mod_base = OTHER; note = 2'-O-methyladenosine
  modified_base 4: mod_base = gm
  modified_base 5: mod_base = cm
  modified_base 6: mod_base = OTHER; note = 2'-O-methyladenosine
  modified_base 7: mod_base = cm
  modified_base 8: mod_base = OTHER; note = 2'-O-methyladenosine
  modified_base 9: mod_base = OTHER; note = 2'-fluoroadenosine
  modified_base 10: mod_base = OTHER; note = 2'-fluoroadenosine
  modified_base 11: mod_base = OTHER; note = 2'-fluoroguanosine
  modified_base 12: mod_base = um
  modified_base 13: mod_base = um
  modified_base 14: mod_base = OTHER; note = 2'-O-methyladenosine
  modified_base 15: mod_base = cm
  modified_base 16: mod_base = um
  modified_base 17: mod_base = um
  modified_base 18: mod_base = OTHER; note = 2'-O-methyladenosine
  modified_base 19: mod_base = gm
  modified_base 20: mod_base = um
  modified_base 21: mod_base = OTHER; note = 2'-O-methyladenosine
  source 1..21: mol_type = other RNA
ccagcacaaagttacttagta

SEQ ID NO: 597 - RNA, 21 nt, synthetic construct
  modified_base 1: mod_base = cm
  modified_base 2: mod_base = OTHER; note = 2'-O-methyladenosine
  modified_base 3: mod_base = gm
  modified_base 4: mod_base = um
  modified_base 5: mod_base = OTHER; note = 2'-O-methyladenosine
  modified_base 6: mod_base = cm
  modified_base 7: mod_base = OTHER; note = 2'-O-methyladenosine
  modified_base 8: mod_base = gm
  modified_base 9: mod_base = OTHER; note = 2'-fluoroguanosine
  modified_base 10: mod_base = OTHER; note = 2'-fluoroadenosine
  modified_base 11: mod_base = OTHER; note = 2'-fluorocytidine
  modified_base 12: mod_base = um
  modified_base 13: mod_base = um
  modified_base 14: mod_base = cm
  modified_base 15: mod_base = OTHER; note = 2'-O-methyladenosine
  modified_base 16: mod_base = um
  modified_base 17: mod_base = cm
  modified_base 18: mod_base = OTHER; note = 2'-O-methyladenosine
  modified_base 19: mod_base = gm
  modified_base 20: mod_base = um
  modified_base 21: mod_base = OTHER; note = 2'-O-methyladenosine
  source 1..21: mol_type = other RNA
cagtacaggacttcatcagta

SEQ ID NO: 598 - RNA, 21 nt, synthetic construct
  modified_base 1: mod_base = cm
  modified_base 2: mod_base = cm
  modified_base 3: mod_base = OTHER; note = 2'-O-methyladenosine
  modified_base 4: mod_base = um
  modified_base 5: mod_base = gm
  modified_base 6: mod_base = cm
  modified_base 7: mod_base = OTHER; note = 2'-O-methyladenosine
  modified_base 8: mod_base = OTHER; note = 2'-O-methyladenosine
  modified_base 9: mod_base = OTHER; note = 2'-fluoroguanosine
  modified_base 10: mod_base = OTHER; note = 2'-fluoroadenosine
  modified_base 11: mod_base = OTHER; note = 2'-fluorocytidine
  modified_base 12: mod_base = um
  modified_base 13: mod_base = cm
  modified_base 14: mod_base = OTHER; note = 2'-O-methyladenosine
  modified_base 15: mod_base = cm
  modified_base 16: mod_base = um
  modified_base 17: mod_base = um
  modified_base 18: mod_base = OTHER; note = 2'-O-methyladenosine
  modified_base 19: mod_base = gm
  modified_base 20: mod_base = um
  modified_base 21: mod_base = OTHER; note = 2'-O-methyladenosine
  source 1..21: mol_type = other RNA
ccatgcaagactcacttagta

SEQ ID NO: 599 - RNA, 21 nt, synthetic construct
  modified_base 1: mod_base = cm
  modified_base 2: mod_base = um
  modified_base 3: mod_base = gm
  modified_base 4: mod_base = gm
  modified_base 5: mod_base = OTHER; note = 2'-O-methyladenosine
  modified_base 6: mod_base = gm
  modified_base 7: mod_base = cm
  modified_base 8: mod_base = OTHER; note = 2'-O-methyladenosine
  modified_base 9: mod_base = OTHER; note = 2'-fluoroadenosine
  modified_base 10: mod_base = OTHER; note = 2'-fluoroguanosine
  modified_base 11: mod_base = OTHER; note = 2'-fluorouridine
  modified_base 12: mod_base = um
  modified_base 13: mod_base = gm
  modified_base 14: mod_base = OTHER; note = 2'-O-methyladenosine
  modified_base 15: mod_base = OTHER; note = 2'-O-methyladenosine
  modified_base 16: mod_base = um
  modified_base 17: mod_base = gm
  modified_base 18: mod_base = OTHER; note = 2'-O-methyladenosine
  modified_base 19: mod_base = um
  modified_base 20: mod_base = cm
  modified_base 21: mod_base = um
  source 1..21: mol_type = other RNA
ctggagcaagttgaatgatct

SEQ ID NO: 600 - RNA, 21 nt, synthetic construct
  modified_base 1: mod_base = cm
  modified_base 2: mod_base = um
  modified_base 3: mod_base = gm
  modified_base 4: mod_base = OTHER; note = 2'-O-methyladenosine
  modified_base 5: mod_base = um
  modified_base 6: mod_base = gm
  modified_base 7: mod_base = OTHER; note = 2'-O-methyladenosine
  modified_base 8: mod_base = OTHER; note = 2'-O-methyladenosine
  modified_base 9: mod_base = OTHER; note = 2'-fluoroguanosine
  modified_base 10: mod_base = OTHER; note = 2'-fluoroguanosine
  modified_base 11: mod_base = OTHER; note = 2'-fluorocytidine
  modified_base 12: mod_base = cm
  modified_base 13: mod_base = um
  modified_base 14: mod_base = um
  modified_base 15: mod_base = cm
  modified_base 16: mod_base = gm
  modified_base 17: mod_base = OTHER; note = 2'-O-methyladenosine
  modified_base 18: mod_base = gm
  modified_base 19: mod_base = um
  modified_base 20: mod_base = cm
  modified_base 21: mod_base = OTHER; note = 2'-O-methyladenosine
  source 1..21: mol_type = other RNA
ctgatgaaggccttcgagtca

SEQ ID NO: 601 - RNA, 21 nt, synthetic construct
  modified_base 1: mod_base = cm
  modified_base 2: mod_base = cm
  modified_base 3: mod_base = OTHER; note = 2'-O-methyladenosine
  modified_base 4: mod_base = gm
  modified_base 5: mod_base = cm
  modified_base 6: mod_base = OTHER; note = 2'-O-methyladenosine
  modified_base 7: mod_base = cm
  modified_base 8: mod_base = OTHER; note = 2'-O-methyladenosine
  modified_base 9: mod_base = OTHER; note = 2'-fluoroadenosine
  modified_base 10: mod_base = OTHER; note = 2'-fluoroadenosine
  modified_base 11: mod_base = OTHER; note = 2'-fluoroguanosine
  modified_base 12: mod_base = um
  modified_base 13: mod_base = um
  modified_base 14: mod_base = OTHER; note = 2'-O-methyladenosine
  modified_base 15: mod_base = cm
  modified_base 16: mod_base = um
  modified_base 17: mod_base = um
  modified_base 18: mod_base = OTHER; note = 2'-O-methyladenosine
  modified_base 19: mod_base = gm
  modified_base 20: mod_base = um
  modified_base 21: mod_base = OTHER; note = 2'-O-methyladenosine
  source 1..21: mol_type = other RNA
ccagcacaaagttacttagta

SEQ ID NO: 602 - RNA, 21 nt, synthetic construct
  modified_base 1: mod_base = cm
  modified_base 2: mod_base = OTHER; note = 2'-O-methyladenosine
  modified_base 3: mod_base = gm
  modified_base 4: mod_base = um
  modified_base 5: mod_base = OTHER; note = 2'-O-methyladenosine
  modified_base 6: mod_base = cm
  modified_base 7: mod_base = OTHER; note = 2'-O-methyladenosine
  modified_base 8: mod_base = gm
  modified_base 9: mod_base = OTHER; note = 2'-fluoroguanosine
  modified_base 10: mod_base = OTHER; note = 2'-fluoroadenosine
  modified_base 11: mod_base = OTHER; note = 2'-fluorocytidine
  modified_base 12: mod_base = um
  modified_base 13: mod_base = um
  modified_base 14: mod_base = cm
  modified_base 15: mod_base = OTHER; note = 2'-O-methyladenosine
  modified_base 16: mod_base = um
  modified_base 17: mod_base = cm
  modified_base 18: mod_base = OTHER; note = 2'-O-methyladenosine
  modified_base 19: mod_base = gm
  modified_base 20: mod_base = um
  modified_base 21: mod_base = OTHER; note = 2'-O-methyladenosine
  source 1..21: mol_type = other RNA
cagtacaggacttcatcagta

SEQ ID NO: 603 - RNA, 21 nt, synthetic construct
  modified_base 1: mod_base = cm
  modified_base 2: mod_base = cm
  modified_base 3: mod_base = OTHER; note = 2'-O-methyladenosine
  modified_base 4: mod_base = um
  modified_base 5: mod_base = gm
  modified_base 6: mod_base = cm
  modified_base 7: mod_base = OTHER; note = 2'-O-methyladenosine
  modified_base 8: mod_base = OTHER; note = 2'-O-methyladenosine
  modified_base 9: mod_base = OTHER; note = 2'-fluoroguanosine
  modified_base 10: mod_base = OTHER; note = 2'-fluoroadenosine
  modified_base 11: mod_base = OTHER; note = 2'-fluorocytidine
  modified_base 12: mod_base = um
  modified_base 13: mod_base = cm
  modified_base 14: mod_base = OTHER; note = 2'-O-methyladenosine
  modified_base 15: mod_base = cm
  modified_base 16: mod_base = um
  modified_base 17: mod_base = um
  modified_base 18: mod_base = OTHER; note = 2'-O-methyladenosine
  modified_base 19: mod_base = gm
  modified_base 20: mod_base = um
  modified_base 21: mod_base = OTHER; note = 2'-O-methyladenosine
  source 1..21: mol_type = other RNA
ccatgcaagactcacttagta

SEQ ID NO: 604 - RNA, 21 nt, synthetic construct
  modified_base 1: mod_base = cm
  modified_base 2: mod_base = um
  modified_base 3: mod_base = gm
  modified_base 4: mod_base = gm
  modified_base 5: mod_base = OTHER; note = 2'-O-methyladenosine
  modified_base 6: mod_base = gm
  modified_base 7: mod_base = cm
  modified_base 8: mod_base = OTHER; note = 2'-O-methyladenosine
  modified_base 9: mod_base = OTHER; note = 2'-fluoroadenosine
  modified_base 10: mod_base = OTHER; note = 2'-fluoroguanosine
  modified_base 11: mod_base = OTHER; note = 2'-fluorouridine
  modified_base 12: mod_base = um
  modified_base 13: mod_base = gm
  modified_base 14: mod_base = OTHER; note = 2'-O-methyladenosine
  modified_base 15: mod_base = OTHER; note = 2'-O-methyladenosine
  modified_base 16: mod_base = um
  modified_base 17: mod_base = gm
  modified_base 18: mod_base = OTHER; note = 2'-O-methyladenosine
  modified_base 19: mod_base = um
  modified_base 20: mod_base = cm
  modified_base 21: mod_base = um
  source 1..21: mol_type = other RNA
ctggagcaagttgaatgatct

SEQ ID NO: 605 - RNA, 21 nt, synthetic construct
  modified_base 1: mod_base = cm
  modified_base 2: mod_base = um
  modified_base 3: mod_base = gm
  modified_base 4: mod_base = gm
  modified_base 5: mod_base = OTHER; note = 2'-O-methyladenosine
  modified_base 6: mod_base = gm
  modified_base 7: mod_base = cm
  modified_base 8: mod_base = OTHER; note = 2'-O-methyladenosine
  modified_base 9: mod_base = OTHER; note = 2'-fluoroadenosine
  modified_base 10: mod_base = gm
  modified_base 11: mod_base = OTHER; note = 2'-fluorouridine
  modified_base 12: mod_base = um
  modified_base 13: mod_base = OTHER; note = 2'-fluoroguanosine
  modified_base 14: mod_base = OTHER; note = 2'-O-methyladenosine
  modified_base 15: mod_base = OTHER; note = 2'-O-methyladenosine
  modified_base 16: mod_base = um
  modified_base 17: mod_base = gm
  modified_base 18: mod_base = OTHER; note = 2'-O-methyladenosine
  modified_base 19: mod_base = um
  modified_base 20: mod_base = cm
  modified_base 21: mod_base = OTHER; note = 2'-O-methyladenosine
  source 1..21: mol_type = other RNA
ctggagcaagttgaatgatca

SEQ ID NO: 606 - RNA, 21 nt, synthetic construct
  modified_base 1: mod_base = cm
  modified_base 2: mod_base = um
  modified_base 3: mod_base = gm
  modified_base 4: mod_base = gm
  modified_base 5: mod_base = OTHER; note = 2'-O-methyladenosine
  modified_base 6: mod_base = gm
  modified_base 7: mod_base = cm
  modified_base 8: mod_base = OTHER; note = 2'-O-methyladenosine
  modified_base 9: mod_base = OTHER; note = 2'-fluoroadenosine
  modified_base 10: mod_base = gm
  modified_base 11: mod_base = OTHER; note = 2'-fluorouridine
  modified_base 12: mod_base = um
  modified_base 13: mod_base = OTHER; note = 2'-fluoroguanosine
  modified_base 14: mod_base = OTHER; note = 2'-O-methyladenosine
  modified_base 15: mod_base = OTHER; note = 2'-O-methyladenosine
  modified_base 16: mod_base = um
  modified_base 17: mod_base = gm
  modified_base 18: mod_base = OTHER; note = 2'-O-methyladenosine
  modified_base 19: mod_base = um
  modified_base 20: mod_base = um
  modified_base 21: mod_base = OTHER; note = 2'-O-methyladenosine
  source 1..21: mol_type = other RNA
ctggagcaagttgaatgatta

SEQ ID NO: 607 - RNA, 21 nt, synthetic construct
  modified_base 1: mod_base = OTHER; note = 2'-O-methyladenosine
  modified_base 2: mod_base = gm
  modified_base 3: mod_base = gm
  modified_base 4: mod_base = um
  modified_base 5: mod_base = OTHER; note = 2'-O-methyladenosine
  modified_base 6: mod_base = OTHER; note = 2'-O-methyladenosine
  modified_base 7: mod_base = um
  modified_base 8: mod_base = um
  modified_base 9: mod_base = OTHER; note = 2'-fluorocytidine
  modified_base 10: mod_base = OTHER; note = 2'-O-methyladenosine
  modified_base 11: mod_base = OTHER; note = 2'-fluoroguanosine
  modified_base 12: mod_base = um
  modified_base 13: mod_base = OTHER; note = 2'-fluorocytidine
  modified_base 14: mod_base = um
  modified_base 15: mod_base = cm
  modified_base 16: mod_base = gm
  modified_base 17: mod_base = um
  modified_base 18: mod_base = um
  modified_base 19: mod_base = gm
  modified_base 20: mod_base = um
  modified_base 21: mod_base = OTHER; note = 2'-O-methyladenosine
  source 1..21: mol_type = other RNA
aggtaattcagtctcgttgta

SEQ ID NO: 608 - RNA, 21 nt, synthetic construct
  modified_base 1: mod_base = cm
  modified_base 2: mod_base = cm
  modified_base 3: mod_base = OTHER; note = 2'-O-methyladenosine
  modified_base 4: mod_base = um
  modified_base 5: mod_base = gm
  modified_base 6: mod_base = cm
  modified_base 7: mod_base = OTHER; note = 2'-O-methyladenosine
  modified_base 8: mod_base = OTHER; note = 2'-O-methyladenosine
  modified_base 9: mod_base = OTHER; note = 2'-fluoroguanosine
  modified_base 10: mod_base = OTHER; note = 2'-O-methyladenosine
  modified_base 11: mod_base = OTHER; note = 2'-fluorocytidine
  modified_base 12: mod_base = OTHER; note = 2'-fluorouridine
  modified_base 13: mod_base = um
  modified_base 14: mod_base = OTHER; note = 2'-O-methyladenosine
  modified_base 15: mod_base = cm
  modified_base 16: mod_base = um
  modified_base 17: mod_base = um
  modified_base 18: mod_base = OTHER; note = 2'-O-methyladenosine
  modified_base 19: mod_base = gm
  modified_base 20: mod_base = um
  modified_base 21: mod_base = OTHER; note = 2'-O-methyladenosine
  source 1..21: mol_type = other RNA
ccatgcaagacttacttagta

SEQ ID NO: 609 - RNA, 21 nt, synthetic construct
  modified_base 1: mod_base = OTHER; note = 2'-O-methyladenosine
  modified_base 2: mod_base = gm
  modified_base 3: mod_base = gm
  modified_base 4: mod_base = cm
  modified_base 5: mod_base = OTHER; note = 2'-O-methyladenosine
  modified_base 6: mod_base = OTHER; note = 2'-O-methyladenosine
  modified_base 7: mod_base = um
  modified_base 8: mod_base = um
  modified_base 9: mod_base = OTHER; note = 2'-fluorocytidine
  modified_base 10: mod_base = OTHER; note = 2'-O-methyladenosine
  modified_base 11: mod_base = OTHER; note = 2'-fluoroguanosine
  modified_base 12: mod_base = um
  modified_base 13: mod_base = OTHER; note = 2'-fluorocytidine
  modified_base 14: mod_base = um
  modified_base 15: mod_base = cm
  modified_base 16: mod_base = gm
  modified_base 17: mod_base = um
  modified_base 18: mod_base = um
  modified_base 19: mod_base = gm
  modified_base 20: mod_base = um
  modified_base 21: mod_base = OTHER; note = 2'-O-methyladenosine
  source 1..21: mol_type = other RNA
aggcaattcagtctcgttgta

SEQ ID NO: 610 - RNA, 21 nt, synthetic construct
  modified_base 1: mod_base = cm
  modified_base 2: mod_base = um
  modified_base 3: mod_base = gm
  modified_base 4: mod_base = gm
  modified_base 5: mod_base = OTHER; note = 2'-O-methyladenosine
  modified_base 6: mod_base = gm
  modified_base 7: mod_base = cm
  modified_base 8: mod_base = OTHER; note = 2'-O-methyladenosine
  modified_base 9: mod_base = OTHER; note = 2'-fluoroadenosine
  modified_base 10: mod_base = gm
  modified_base 11: mod_base = OTHER; note = 2'-fluorouridine
  modified_base 12: mod_base = um
  modified_base 13: mod_base = OTHER; note = 2'-fluoroguanosine
  modified_base 14: mod_base = OTHER; note = 2'-O-methyladenosine
  modified_base 15: mod_base = OTHER; note = 2'-O-methyladenosine
  modified_base 16: mod_base = um
  modified_base 17: mod_base = gm
  modified_base 18: mod_base = OTHER; note = 2'-O-methyladenosine
  modified_base 19: mod_base = um
  modified_base 20: mod_base = cm
  modified_base 21: mod_base = OTHER; note = 2'-O-methyladenosine
  source 1..21: mol_type = other RNA
ctggagcaagttgaatgatca

SEQ ID NO: 611 - RNA, 21 nt, synthetic construct
  modified_base 1: mod_base = cm
  modified_base 2: mod_base = cm
  modified_base 3: mod_base = OTHER; note = 2'-O-methyladenosine
  modified_base 4: mod_base = um
  modified_base 5: mod_base = gm
  modified_base 6: mod_base = cm
  modified_base 7: mod_base = OTHER; note = 2'-O-methyladenosine
  modified_base 8: mod_base = OTHER; note = 2'-O-methyladenosine
  modified_base 9: mod_base = OTHER; note = 2'-fluoroguanosine
  modified_base 10: mod_base = OTHER; note = 2'-O-methyladenosine
  modified_base 11: mod_base = OTHER; note = 2'-fluorocytidine
  modified_base 12: mod_base = OTHER; note = 2'-fluorouridine
  modified_base 13: mod_base = cm
  modified_base 14: mod_base = OTHER; note = 2'-O-methyladenosine
  modified_base 15: mod_base = cm
  modified_base 16: mod_base = um
  modified_base 17: mod_base = um
  modified_base 18: mod_base = OTHER; note = 2'-O-methyladenosine
  modified_base 19: mod_base = gm
  modified_base 20: mod_base = um
  modified_base 21: mod_base = OTHER; note = 2'-O-methyladenosine
  source 1..21: mol_type = other RNA
ccatgcaagactcacttagta

SEQ ID NO: 612 - RNA, 21 nt, synthetic construct
  modified_base 1: mod_base = OTHER; note = 2'-O-methyladenosine
  modified_base 2: mod_base = gm
  modified_base 3: mod_base = gm
  modified_base 4: mod_base = cm
  modified_base 5: mod_base = OTHER; note = 2'-O-methyladenosine
  modified_base 6: mod_base = OTHER; note = 2'-O-methyladenosine
  modified_base 7: mod_base = um
  modified_base 8: mod_base = um
  modified_base 9: mod_base = OTHER; note = 2'-fluorocytidine
  modified_base 10: mod_base = OTHER; note = 2'-fluoroadenosine
  modified_base 11: mod_base = OTHER; note = 2'-fluoroguanosine
  modified_base 12: mod_base = um
  modified_base 13: mod_base = cm
  modified_base 14: mod_base = um
  modified_base 15: mod_base = cm
  modified_base 16: mod_base = gm
  modified_base 17: mod_base = um
  modified_base 18: mod_base = um
  modified_base 19: mod_base = gm
  modified_base 20: mod_base = um
  modified_base 21: mod_base = OTHER; note = 2'-O-methyladenosine
  source 1..21: mol_type = other RNA
aggcaattcagtctcgttgta

SEQ ID NO: 613 - RNA, 21 nt, synthetic construct
  modified_base 1: mod_base = cm
  modified_base 2: mod_base = um
  modified_base 3: mod_base = gm
  modified_base 4: mod_base = gm
  modified_base 5: mod_base = OTHER; note = 2'-O-methyladenosine
  modified_base 6: mod_base = gm
  modified_base 7: mod_base = cm
  modified_base 8: mod_base = OTHER; note = 2'-O-methyladenosine
  modified_base 9: mod_base = OTHER; note = 2'-fluoroadenosine
  modified_base 10: mod_base = OTHER; note = 2'-fluoroguanosine
  modified_base 11: mod_base = OTHER; note = 2'-fluorouridine
  modified_base 12: mod_base = um
  modified_base 13: mod_base = gm
  modified_base 14: mod_base = OTHER; note = 2'-O-methyladenosine
  modified_base 15: mod_base = OTHER; note = 2'-O-methyladenosine
  modified_base 16: mod_base = um
  modified_base 17: mod_base = gm
  modified_base 18: mod_base = OTHER; note = 2'-O-methyladenosine
  modified_base 19: mod_base = um
  modified_base 20: mod_base = cm
  modified_base 21: mod_base = um
  source 1..21: mol_type = other RNA
ctggagcaagttgaatgatct

SEQ ID NO: 614 - RNA, 21 nt, synthetic construct
  modified_base 1: mod_base = OTHER; note = 2'-O-methyladenosine
  modified_base 2: mod_base = gm
  modified_base 3: mod_base = gm
  modified_base 4: mod_base = cm
  modified_base 5: mod_base = OTHER; note = 2'-O-methyladenosine
  modified_base 6: mod_base = OTHER; note = 2'-O-methyladenosine
  modified_base 7: mod_base = um
  modified_base 8: mod_base = um
  modified_base 9: mod_base = OTHER; note = 2'-fluorocytidine
  modified_base 10: mod_base = OTHER; note = 2'-O-methyladenosine
  modified_base 11: mod_base = OTHER; note = 2'-fluoroguanosine
  modified_base 12: mod_base = um
  modified_base 13: mod_base = OTHER; note = 2'-fluorocytidine
  modified_base 14: mod_base = um
  modified_base 15: mod_base = cm
  modified_base 16: mod_base = gm
  modified_base 17: mod_base = um
  modified_base 18: mod_base = um
  modified_base 19: mod_base = gm
  modified_base 20: mod_base = um
  modified_base 21: mod_base = OTHER; note = 2'-O-methyladenosine
  source 1..21: mol_type = other RNA
aggcaattcagtctcgttgta

SEQ ID NO: 615 - RNA, 21 nt, synthetic construct
  modified_base 1: mod_base = cm
  modified_base 2: mod_base = um
  modified_base 3: mod_base = gm
  modified_base 4: mod_base = gm
  modified_base 5: mod_base = OTHER; note = 2'-O-methyladenosine
  modified_base 6: mod_base = gm
  modified_base 7: mod_base = cm
  modified_base 8: mod_base = OTHER; note = 2'-O-methyladenosine
  modified_base 9: mod_base = OTHER; note = 2'-fluoroadenosine
  modified_base 10: mod_base = gm
  modified_base 11: mod_base = OTHER; note = 2'-fluorouridine
  modified_base 12: mod_base = um
  modified_base 13: mod_base = OTHER; note = 2'-fluoroguanosine
  modified_base 14: mod_base = OTHER; note = 2'-O-methyladenosine
  modified_base 15: mod_base = OTHER; note = 2'-O-methyladenosine
  modified_base 16: mod_base = um
  modified_base 17: mod_base = gm
  modified_base 18: mod_base = OTHER; note = 2'-O-methyladenosine
  modified_base 19: mod_base = um
  modified_base 20: mod_base = cm
  modified_base 21: mod_base = OTHER; note = 2'-O-methyladenosine
  source 1..21: mol_type = other RNA
ctggagcaagttgaatgatca

SEQ ID NO: 616 - RNA, 21 nt, synthetic construct
  modified_base 1: mod_base = OTHER; note = 2'-O-methyladenosine
  modified_base 2: mod_base = gm
  modified_base 3: mod_base = gm
  modified_base 4: mod_base = cm
  modified_base 5: mod_base = OTHER; note = 2'-O-methyladenosine
  modified_base 6: mod_base = OTHER; note = 2'-O-methyladenosine
  modified_base 7: mod_base = um
  modified_base 8: mod_base = um
  modified_base 9: mod_base = OTHER; note = 2'-fluorocytidine
  modified_base 10: mod_base = OTHER; note = 2'-O-methyladenosine
  modified_base 11: mod_base = OTHER; note = 2'-fluoroguanosine
  modified_base 12: mod_base = um
  modified_base 13: mod_base = OTHER; note = 2'-fluorocytidine
  modified_base 14: mod_base = um
  modified_base 15: mod_base = cm
  modified_base 16: mod_base = gm
  modified_base 17: mod_base = um
  modified_base 18: mod_base = um
  modified_base 19: mod_base = gm
  modified_base 20: mod_base = um
  modified_base 21: mod_base = OTHER; note = 2'-O-methyladenosine
  source 1..21: mol_type = other RNA
aggcaattcagtctcgttgta

SEQ ID NO: 617 - RNA, 21 nt, synthetic construct
  modified_base 1: mod_base = cm
  modified_base 2: mod_base = cm
  modified_base 3: mod_base = OTHER; note = 2'-O-methyladenosine
  modified_base 4: mod_base = um
  modified_base 5: mod_base = gm
  modified_base 6: mod_base = cm
  modified_base 7: mod_base = OTHER; note = 2'-O-methyladenosine
  modified_base 8: mod_base = OTHER; note = 2'-O-methyladenosine
  modified_base 9: mod_base = OTHER; note = 2'-fluoroguanosine
  modified_base 10: mod_base = OTHER; note = 2'-O-methyladenosine
  modified_base 11: mod_base = OTHER; note = 2'-fluorocytidine
  modified_base 12: mod_base = OTHER; note = 2'-fluorouridine
  modified_base 13: mod_base = cm
  modified_base 14: mod_base = OTHER; note = 2'-O-methyladenosine
  modified_base 15: mod_base = cm
  modified_base 16: mod_base = um
  modified_base 17: mod_base = um
  modified_base 18: mod_base = OTHER; note = 2'-O-methyladenosine
  modified_base 19: mod_base = gm
  modified_base 20: mod_base = um
  modified_base 21: mod_base = OTHER; note = 2'-O-methyladenosine
  source 1..21: mol_type = other RNA
ccatgcaagactcacttagta

SEQ ID NO: 618 - RNA, 21 nt, synthetic construct
  modified_base 1: mod_base = cm
  modified_base 2: mod_base = um
  modified_base 3: mod_base = gm
  modified_base 4: mod_base = gm
  modified_base 5: mod_base = OTHER; note = 2'-O-methyladenosine
  modified_base 6: mod_base = gm
  modified_base 7: mod_base = cm
  modified_base 8: mod_base = OTHER; note = 2'-O-methyladenosine
  modified_base 9: mod_base = OTHER; note = 2'-fluoroadenosine
  modified_base 10: mod_base = gm
  modified_base 11: mod_base = OTHER; note = 2'-fluorouridine
  modified_base 12: mod_base = um
  modified_base 13: mod_base = OTHER; note = 2'-fluoroguanosine
  modified_base 14: mod_base = OTHER; note = 2'-O-methyladenosine
  modified_base 15: mod_base = OTHER; note = 2'-O-methyladenosine
  modified_base 16: mod_base = um
  modified_base 17: mod_base = gm
  modified_base 18: mod_base = OTHER; note = 2'-O-methyladenosine
  modified_base 19: mod_base = um
  modified_base 20: mod_base = cm
  modified_base 21: mod_base = OTHER; note = 2'-O-methyladenosine
  source 1..21: mol_type = other RNA
ctggagcaagttgaatgatca

SEQ ID NO: 619 - RNA, 21 nt, synthetic construct
  modified_base 1: mod_base = OTHER; note = 2'-O-methyladenosine
  modified_base 2: mod_base = gm
  modified_base 3: mod_base = gm
  modified_base 4: mod_base = cm
  modified_base 5: mod_base = OTHER; note = 2'-O-methyladenosine
  modified_base 6: mod_base = OTHER; note = 2'-O-methyladenosine
  modified_base 7: mod_base = um
  modified_base 8: mod_base = um
  modified_base 9: mod_base = OTHER; note = 2'-fluorocytidine
  modified_base 10: mod_base = OTHER; note = 2'-fluoroadenosine
  modified_base 11: mod_base = OTHER; note = 2'-fluoroguanosine
  modified_base 12: mod_base = um
  modified_base 13: mod_base = cm
  modified_base 14: mod_base = um
  modified_base 15: mod_base = cm
  modified_base 16: mod_base = gm
  modified_base 17: mod_base = um
  modified_base 18: mod_base = um
  modified_base 19: mod_base = gm
  modified_base 20: mod_base = um
  modified_base 21: mod_base = OTHER; note = 2'-O-methyladenosine
  source 1..21: mol_type = other RNA
aggcaattcagtctcgttgta

SEQ ID NO: 620 - RNA, 21 nt, synthetic construct
  modified_base 1: mod_base = cm
  modified_base 2: mod_base = um
  modified_base 3: mod_base = gm
  modified_base 4: mod_base = gm
  modified_base 5: mod_base = OTHER; note = 2'-O-methyladenosine
  modified_base 6: mod_base = gm
  modified_base 7: mod_base = cm
  modified_base 8: mod_base = OTHER; note = 2'-O-methyladenosine
  modified_base 9: mod_base = OTHER; note = 2'-fluoroadenosine
  modified_base 10: mod_base = OTHER; note = 2'-fluoroguanosine
  modified_base 11: mod_base = OTHER; note = 2'-fluorouridine
  modified_base 12: mod_base = um
  modified_base 13: mod_base = gm
  modified_base 14: mod_base = OTHER; note = 2'-O-methyladenosine
  modified_base 15: mod_base = OTHER; note = 2'-O-methyladenosine
  modified_base 16: mod_base = um
  modified_base 17: mod_base = gm
  modified_base 18: mod_base = OTHER; note = 2'-O-methyladenosine
  modified_base 19: mod_base = um
  modified_base 20: mod_base = cm
  modified_base 21: mod_base = um
  source 1..21: mol_type = other RNA
ctggagcaagttgaatgatct

SEQ ID NO: 621 - RNA, 21 nt, synthetic construct
  modified_base 1: mod_base = OTHER; note = 2'-O-methyladenosine
  modified_base 2: mod_base = gm
  modified_base 3: mod_base = gm
  modified_base 4: mod_base = cm
  modified_base 5: mod_base = OTHER; note = 2'-O-methyladenosine
  modified_base 6: mod_base = OTHER; note = 2'-O-methyladenosine
  modified_base 7: mod_base = um
  modified_base 8: mod_base = um
  modified_base 9: mod_base = OTHER; note = 2'-fluorocytidine
  modified_base 10: mod_base = OTHER; note = 2'-fluoroadenosine
  modified_base 11: mod_base = OTHER; note = 2'-fluoroguanosine
  modified_base 12: mod_base = um
  modified_base 13: mod_base = cm
  modified_base 14: mod_base = um
  modified_base 15: mod_base = cm
  modified_base 16: mod_base = gm
  modified_base 17: mod_base = um
  modified_base 18: mod_base = um
  modified_base 19: mod_base = gm
  modified_base 20: mod_base = um
  modified_base 21: mod_base = OTHER; note = 2'-O-methyladenosine
  source 1..21: mol_type = other RNA
aggcaattcagtctcgttgta

SEQ ID NO: 622 - RNA, 21 nt, synthetic construct
  modified_base 1: mod_base = OTHER; note = 2'-O-methyladenosine
  modified_base 2: mod_base = OTHER; note = 2'-O-methyladenosine
  modified_base 3: mod_base = OTHER; note = 2'-O-methyladenosine
  modified_base 4: mod_base = cm
  modified_base 5: mod_base = OTHER; note = 2'-O-methyladenosine
  modified_base 6: mod_base = gm
  modified_base 7: mod_base = OTHER; note = 2'-O-methyladenosine
  modified_base 8: mod_base = um
  modified_base 9: mod_base = OTHER; note = 2'-fluorocytidine
  modified_base 10: mod_base = OTHER; note = 2'-fluoroadenosine
  modified_base 11: mod_base = OTHER; note = 2'-fluorouridine
  modified_base 12: mod_base = um
  modified_base 13: mod_base = gm
  modified_base 14: mod_base = gm
  modified_base 15: mod_base = OTHER; note = 2'-O-methyladenosine
  modified_base 16: mod_base = OTHER; note = 2'-O-methyladenosine
  modified_base 17: mod_base = um
  modified_base 18: mod_base = um
  modified_base 19: mod_base = cm
  modified_base 20: mod_base = cm
  modified_base 21: mod_base = um
  source 1..21: mol_type = other RNA
aaacagatcattggaattcct

SEQ ID NO: 623 - RNA, 21 nt, synthetic construct
  modified_base 1: mod_base = um
  modified_base 2: mod_base = gm
  modified_base 3: mod_base = um
  modified_base 4: mod_base = gm
  modified_base 5: mod_base = OTHER; note = 2'-O-methyladenosine
  modified_base 6: mod_base = um
  modified_base 7: mod_base = um
  modified_base 8: mod_base = OTHER; note = 2'-O-methyladenosine
  modified_base 9: mod_base = OTHER; note = 2'-fluorouridine
  modified_base 10: mod_base = OTHER; note = 2'-fluoroguanosine
  modified_base 11: mod_base = OTHER; note = 2'-fluorouridine
  modified_base 12: mod_base = cm
  modified_base 13: mod_base = um
  modified_base 14: mod_base = gm
  modified_base 15: mod_base = um
  modified_base 16: mod_base = cm
  modified_base 17: mod_base = OTHER; note = 2'-O-methyladenosine
  modified_base 18: mod_base = gm
  modified_base 19: mod_base = OTHER; note = 2'-O-methyladenosine
  modified_base 20: mod_base = OTHER; note = 2'-O-methyladenosine
  modified_base 21: mod_base = OTHER; note = 2'-O-methyladenosine
  source 1..21: mol_type = other RNA
tgtgattatgtctgtcagaaa

SEQ ID NO: 624 - RNA, 21 nt, synthetic construct
  modified_base 1: mod_base = um
  modified_base 2: mod_base = gm
  modified_base 3: mod_base = um
  modified_base 4: mod_base = gm
  modified_base 5: mod_base = OTHER; note = 2'-O-methyladenosine
  modified_base 6: mod_base = um
  modified_base 7: mod_base = um
  modified_base 8: mod_base = OTHER; note = 2'-O-methyladenosine
  modified_base 9: mod_base = OTHER; note = 2'-fluorouridine
  modified_base 10: mod_base = OTHER; note = 2'-fluoroguanosine
  modified_base 11: mod_base = OTHER; note = 2'-fluorouridine
  modified_base 12: mod_base = cm
  modified_base 13: mod_base = um
  modified_base 14: mod_base = gm
  modified_base 15: mod_base = um
  modified_base 16: mod_base = cm
  modified_base 17: mod_base = OTHER; note = 2'-O-methyladenosine
  modified_base 18: mod_base = gm
  modified_base 19: mod_base = OTHER; note = 2'-O-methyladenosine
  modified_base 20: mod_base = OTHER; note = 2'-O-methyladenosine
  modified_base 21: mod_base = OTHER; note = 2'-O-methyladenosine
  source 1..21: mol_type = other RNA
tgtgattatgtctgtcagaaa

SEQ ID NO: 625 - RNA, 21 nt, synthetic construct
  modified_base 1: mod_base = OTHER; note = 2'-O-methyladenosine
  modified_base 2: mod_base = OTHER; note = 2'-O-methyladenosine
  modified_base 3: mod_base = OTHER; note = 2'-O-methyladenosine
  modified_base 4: mod_base = cm
  modified_base 5: mod_base = OTHER; note = 2'-O-methyladenosine
  modified_base 6: mod_base = gm
  modified_base 7: mod_base = OTHER; note = 2'-O-methyladenosine
  modified_base 8: mod_base = um
  modified_base 9: mod_base = OTHER; note = 2'-fluorocytidine
  modified_base 10: mod_base = OTHER; note = 2'-fluoroadenosine
  modified_base 11: mod_base = OTHER; note = 2'-fluorouridine
  modified_base 12: mod_base = um
  modified_base 13: mod_base = gm
  modified_base 14: mod_base = gm
  modified_base 15: mod_base = OTHER; note = 2'-O-methyladenosine
  modified_base 16: mod_base = OTHER; note = 2'-O-methyladenosine
  modified_base 17: mod_base = um
  modified_base 18: mod_base = um
  modified_base 19: mod_base = cm
  modified_base 20: mod_base = cm
  modified_base 21: mod_base = um
  source 1..21: mol_type = other RNA
aaacagatcattggaattcct

SEQ ID NO: 626 - RNA, 21 nt, synthetic construct
  modified_base 1: mod_base = cm
  modified_base 2: mod_base = gm
  modified_base 3: mod_base = cm
  modified_base 4: mod_base = um
  modified_base 5: mod_base = cm
  modified_base 6: mod_base = OTHER; note = 2'-O-methyladenosine
  modified_base 7: mod_base = gm
  modified_base 8: mod_base = gm
  modified_base 9: mod_base = OTHER; note = 2'-fluorouridine
  modified_base 10: mod_base = OTHER; note = 2'-fluorouridine
  modified_base 11: mod_base = OTHER; note = 2'-fluorocytidine
  modified_base 12: mod_base = um
  modified_base 13: mod_base = gm
  modified_base 14: mod_base = cm
  modified_base 15: mod_base = um
  modified_base 16: mod_base = um
  modified_base 17: mod_base = um
  modified_base 18: mod_base = um
  modified_base 19: mod_base = OTHER; note = 2'-O-methyladenosine
  modified_base 20: mod_base = cm
  modified_base 21: mod_base = OTHER; note = 2'-O-methyladenosine
  source 1..21: mol_type = other RNA
cgctcaggttctgcttttaca

SEQ ID NO: 627 - RNA, 21 nt, synthetic construct
  modified_base 1: mod_base = gm
  modified_base 2: mod_base = OTHER; note = 2'-O-methyladenosine
  modified_base 3: mod_base = cm
  modified_base 4: mod_base = cm
  modified_base 5: mod_base = cm
  modified_base 6: mod_base = um
  modified_base 7: mod_base = gm
  modified_base 8: mod_base = gm
  modified_base 9: mod_base = OTHER; note = 2'-fluoroadenosine
  modified_base 10: mod_base = OTHER; note = 2'-fluoroadenosine
  modified_base 11: mod_base = OTHER; note = 2'-fluoroadenosine
  modified_base 12: mod_base = OTHER; note = 2'-O-methyladenosine
  modified_base 13: mod_base = gm
  modified_base 14: mod_base = cm
  modified_base 15: mod_base = um
  modified_base 16: mod_base = gm
  modified_base 17: mod_base = OTHER; note = 2'-O-methyladenosine
  modified_base 18: mod_base = um
  modified_base 19: mod_base = gm
  modified_base 20: mod_base = OTHER; note = 2'-O-methyladenosine
  modified_base 21: mod_base = OTHER; note = 2'-O-methyladenosine
  source 1..21: mol_type = other RNA
gaccctggaaaagctgatgaa

SEQ ID NO: 628 - RNA, 21 nt, synthetic construct
  modified_base 1: mod_base = um
  modified_base 2: mod_base = gm
  modified_base 3: mod_base = gm
  modified_base 4: mod_base = OTHER; note = 2'-O-methyladenosine
  modified_base 5: mod_base = OTHER; note = 2'-O-methyladenosine
  modified_base 6: mod_base = OTHER; note = 2'-O-methyladenosine
  modified_base 7: mod_base = OTHER; note = 2'-O-methyladenosine
  modified_base 8: mod_base = gm
  modified_base 9: mod_base = OTHER; note = 2'-fluorocytidine
  modified_base 10: mod_base = OTHER; note = 2'-fluorouridine
  modified_base 11: mod_base = OTHER; note = 2'-fluoroguanosine
  modified_base 12: mod_base = OTHER; note = 2'-O-methyladenosine
  modified_base 13: mod_base = um
  modified_base 14: mod_base = gm
  modified_base 15: mod_base = OTHER; note = 2'-O-methyladenosine
  modified_base 16: mod_base = OTHER; note = 2'-O-methyladenosine
  modified_base 17: mod_base = gm
  modified_base 18: mod_base = gm
  modified_base 19: mod_base = cm
  modified_base 20: mod_base = cm
  modified_base 21: mod_base = um
  source 1..21: mol_type = other RNA
tggaaaagctgatgaaggcct

SEQ ID NO: 629 - RNA, 21 nt, synthetic construct
  modified_base 1: mod_base = cm
  modified_base 2: mod_base = um
  modified_base 3: mod_base = gm
  modified_base 4: mod_base = OTHER; note = 2'-O-methyladenosine
  modified_base 5: mod_base = um
  modified_base 6: mod_base = gm
  modified_base 7: mod_base = OTHER; note = 2'-O-methyladenosine
  modified_base 8: mod_base = OTHER; note = 2'-O-methyladenosine
  modified_base 9: mod_base = OTHER; note = 2'-fluoroguanosine
  modified_base 10: mod_base = OTHER; note = 2'-fluoroguanosine
  modified_base 11: mod_base = OTHER; note = 2'-fluorocytidine
  modified_base 12: mod_base = cm
  modified_base 13: mod_base = um
  modified_base 14: mod_base = um
  modified_base 15: mod_base = cm
  modified_base 16: mod_base = gm
  modified_base 17: mod_base = OTHER; note = 2'-O-methyladenosine
  modified_base 18: mod_base = gm
  modified_base 19: mod_base = um
  modified_base 20: mod_base = cm
  modified_base 21: mod_base = OTHER; note = 2'-O-methyladenosine
  source 1..21: mol_type = other RNA
ctgatgaaggccttcgagtca

SEQ ID NO: 630 - RNA, 21 nt, synthetic construct
  modified_base 1: mod_base = gm
  modified_base 2: mod_base = gm
  modified_base 3: mod_base = cm
  modified_base 4: mod_base = cm
  modified_base 5: mod_base = um
  modified_base 6: mod_base = um
  modified_base 7: mod_base = cm
  modified_base 8: mod_base = gm
  modified_base 9: mod_base = OTHER; note = 2'-fluoroadenosine
  modified_base 10: mod_base = OTHER; note = 2'-fluoroguanosine
  modified_base 11: mod_base = OTHER; note = 2'-fluorouridine
  modified_base 12: mod_base = cm
  modified_base 13: mod_base = cm
  modified_base 14: mod_base = cm
  modified_base 15: mod_base = um
  modified_base 16: mod_base = cm
  modified_base 17: mod_base = OTHER; note = 2'-O-methyladenosine
  modified_base 18: mod_base = OTHER; note = 2'-O-methyladenosine
  modified_base 19: mod_base = gm
  modified_base 20: mod_base = um
  modified_base 21: mod_base = OTHER; note = 2'-O-methyladenosine
  source 1..21: mol_type = other RNA
ggccttcgagtccctcaagta

SEQ ID NO: 631 - RNA, 21 nt, synthetic construct
  modified_base 1: mod_base = gm
  modified_base 2: mod_base = cm
  modified_base 3: mod_base = cm
  modified_base 4: mod_base = um
  modified_base 5: mod_base = um
  modified_base 6: mod_base = cm
  modified_base 7: mod_base = gm
  modified_base 8: mod_base = OTHER; note = 2'-O-methyladenosine
  modified_base 9: mod_base = OTHER; note = 2'-fluoroguanosine
  modified_base 10: mod_base = OTHER; note = 2'-fluorouridine
  modified_base 11: mod_base = OTHER; note = 2'-fluorocytidine
  modified_base 12: mod_base = cm
  modified_base 13: mod_base = cm
  modified_base 14: mod_base = um
  modified_base 15: mod_base = cm
  modified_base 16: mod_base = OTHER; note = 2'-O-methyladenosine
  modified_base 17: mod_base = OTHER; note = 2'-O-methyladenosine
  modified_base 18: mod_base = gm
  modified_base 19: mod_base = um
  modified_base 20: mod_base = cm
  modified_base 21: mod_base = OTHER; note = 2'-O-methyladenosine
  source 1..21: mol_type = other RNA
gccttcgagtccctcaagtca

SEQ ID NO: 632 - RNA, 21 nt, synthetic construct
  modified_base 1: mod_base = cm
  modified_base 2: mod_base = OTHER; note = 2'-O-methyladenosine
  modified_base 3: mod_base = um
  modified_base 4: mod_base = cm
  modified_base 5: mod_base = gm
  modified_base 6: mod_base = cm
  modified_base 7: mod_base = um
  modified_base 8: mod_base = OTHER; note = 2'-O-methyladenosine
  modified_base 9: mod_base = OTHER; note = 2'-fluorouridine
  modified_base 10: mod_base = OTHER; note = 2'-fluoroguanosine
  modified_base 11: mod_base = OTHER; note = 2'-fluoroguanosine
  modified_base 12: mod_base = OTHER; note = 2'-O-methyladenosine
  modified_base 13: mod_base = OTHER; note = 2'-O-methyladenosine
  modified_base 14: mod_base = cm
  modified_base 15: mod_base = um
  modified_base 16: mod_base = um
  modified_base 17: mod_base = um
  modified_base 18: mod_base = um
  modified_base 19: mod_base = um
  modified_base 20: mod_base = cm
  modified_base 21: mod_base = um
  source 1..21: mol_type = other RNA
catcgctatggaactttttct

SEQ ID NO: 633 - RNA, 21 nt, synthetic construct
  modified_base 1: mod_base = gm
  modified_base 2: mod_base = cm
  modified_base 3: mod_base = um
  modified_base 4: mod_base = um
  modified_base 5: mod_base = um
  modified_base 6: mod_base = gm
  modified_base 7: mod_base = OTHER; note = 2'-O-methyladenosine
  modified_base 8: mod_base = um
  modified_base 9: mod_base = OTHER; note = 2'-fluoroguanosine
  modified_base 10: mod_base = OTHER; note = 2'-fluoroguanosine
  modified_base 11: mod_base = OTHER; note = 2'-fluoroadenosine
  modified_base 12: mod_base = um
  modified_base 13: mod_base = um
  modified_base 14: mod_base = cm
  modified_base 15: mod_base = um
  modified_base 16: mod_base = OTHER; note = 2'-O-methyladenosine
  modified_base 17: mod_base = OTHER; note = 2'-O-methyladenosine
  modified_base 18: mod_base = um
  modified_base 19: mod_base = cm
  modified_base 20: mod_base = um
  modified_base 21: mod_base = um
  source 1..21: mol_type = other RNA
gctttgatggattctaatctt

SEQ ID NO: 634 - RNA, 21 nt, synthetic construct
  modified_base 1: mod_base = gm
  modified_base 2: mod_base = OTHER; note = 2'-O-methyladenosine
  modified_base 3: mod_base = um
  modified_base 4: mod_base = gm
  modified_base 5: mod_base = gm
  modified_base 6: mod_base = OTHER; note = 2'-O-methyladenosine
  modified_base 7: mod_base = um
  modified_base 8: mod_base = um
  modified_base 9: mod_base = OTHER; note = 2'-fluorocytidine
  modified_base 10: mod_base = OTHER; note = 2'-fluorouridine
  modified_base 11: mod_base = OTHER; note = 2'-fluoroadenosine
  modified_base 12: mod_base = OTHER; note = 2'-O-methyladenosine
  modified_base 13: mod_base = um
  modified_base 14: mod_base = cm
  modified_base 15: mod_base = um
  modified_base 16: mod_base = um
  modified_base 17: mod_base = cm
  modified_base 18: mod_base = cm
  modified_base 19: mod_base = OTHER; note = 2'-O-methyladenosine
  modified_base 20: mod_base = OTHER; note = 2'-O-methyladenosine
  modified_base 21: mod_base = OTHER; note = 2'-O-methyladenosine
  source 1..21: mol_type = other RNA
gatggattctaatcttccaaa

SEQ ID NO: 635 - RNA, 21 nt, synthetic construct
  modified_base 1: mod_base = um
  modified_base 2: mod_base = gm
  modified_base 3: mod_base = gm
  modified_base 4: mod_base = cm
  modified_base 5: mod_base = OTHER; note = 2'-O-methyladenosine
  modified_base 6: mod_base = OTHER; note = 2'-O-methyladenosine
  modified_base 7: mod_base = um
  modified_base 8: mod_base = um
  modified_base 9: mod_base = OTHER; note = 2'-fluorouridine
  modified_base 10: mod_base = OTHER; note = 2'-fluorouridine
  modified_base 11: mod_base = OTHER; note = 2'-fluoroguanosine
  modified_base 12: mod_base = cm
  modified_base 13: mod_base = OTHER; note = 2'-O-methyladenosine
  modified_base 14: mod_base = OTHER; note = 2'-O-methyladenosine
  modified_base 15: mod_base = OTHER; note = 2'-O-methyladenosine
  modified_base 16: mod_base = um
  modified_base 17: mod_base = gm
  modified_base 18: mod_base = OTHER; note = 2'-O-methyladenosine
  modified_base 19: mod_base = cm
  modified_base 20: mod_base = OTHER; note = 2'-O-methyladenosine
  modified_base 21: mod_base = OTHER; note = 2'-O-methyladenosine
  source 1..21: mol_type = other RNA
tggcaattttgcaaatgacaa

SEQ ID NO: 636 - RNA, 21 nt, synthetic construct
  modified_base 1: mod_base = cm
  modified_base 2: mod_base = um
  modified_base 3: mod_base = gm
  modified_base 4: mod_base = OTHER; note = 2'-O-methyladenosine
  modified_base 5: mod_base = cm
  modified_base 6: mod_base = gm
  modified_base 7: mod_base = um
  modified_base 8: mod_base = um
  modified_base 9: mod_base = OTHER; note = 2'-fluoroadenosine
  modified_base 10: mod_base = OTHER; note = 2'-fluorocytidine
  modified_base 11: mod_base = OTHER; note = 2'-fluoroadenosine
  modified_base 12: mod_base = um
  modified_base 13: mod_base = cm
  modified_base 14: mod_base = OTHER; note = 2'-O-methyladenosine
  modified_base 15: mod_base = um
  modified_base 16: mod_base = OTHER; note = 2'-O-methyladenosine
  modified_base 17: mod_base = cm
  modified_base 18: mod_base = OTHER; note = 2'-O-methyladenosine
  modified_base 19: mod_base = cm
  modified_base 20: mod_base = OTHER; note = 2'-O-methyladenosine
  modified_base 21: mod_base = OTHER; note = 2'-O-methyladenosine
  source 1..21: mol_type = other RNA
ctgacgttacatcatacacaa

SEQ ID NO: 637 - RNA, 21 nt, synthetic construct
  modified_base 1: mod_base = gm
  modified_base 2: mod_base = cm
  modified_base 3: mod_base = OTHER; note = 2'-O-methyladenosine
  modified_base 4: mod_base = cm
  modified_base 5: mod_base = cm
  modified_base 6: mod_base = OTHER; note = 2'-O-methyladenosine
  modified_base 7: mod_base = OTHER; note = 2'-O-methyladenosine
  modified_base 8: mod_base = gm
  modified_base 9: mod_base = OTHER; note = 2'-fluoroadenosine
  modified_base 10: mod_base = OTHER; note = 2'-fluorocytidine
  modified_base 11: mod_base = OTHER; note = 2'-fluorocytidine
  modified_base 12: mod_base = OTHER; note = 2'-O-methyladenosine
  modified_base 13: mod_base = cm
  modified_base 14: mod_base = OTHER; note = 2'-O-methyladenosine
  modified_base 15: mod_base = OTHER; note = 2'-O-methyladenosine
  modified_base 16: mod_base = um
  modified_base 17: mod_base = gm
  modified_base 18: mod_base = um
  modified_base 19: mod_base = um
  modified_base 20: mod_base = gm
  modified_base 21: mod_base = um
  source 1..21: mol_type = other RNA
gcaccaagaccacaatgttgt

SEQ ID NO: 638 - RNA, 21 nt, synthetic construct
  modified_base 1: mod_base = gm
  modified_base 2: mod_base = OTHER; note = 2'-O-methyladenosine
  modified_base 3: mod_base = gm
  modified_base 4: mod_base = um
  modified_base 5: mod_base = OTHER; note = 2'-O-methyladenosine
  modified_base 6: mod_base = um
  modified_base 7: mod_base = um
  modified_base 8: mod_base = gm
  modified_base 9: mod_base = OTHER; note = 2'-fluorouridine
  modified_base 10: mod_base = OTHER; note = 2'-fluoroguanosine
  modified_base 11: mod_base = OTHER; note = 2'-fluoroguanosine
  modified_base 12: mod_base = OTHER; note = 2'-O-methyladenosine
  modified_base 13: mod_base = OTHER; note = 2'-O-methyladenosine
  modified_base 14: mod_base = cm
  modified_base 15: mod_base = um
  modified_base 16: mod_base = um
  modified_base 17: mod_base = OTHER; note = 2'-O-methyladenosine
  modified_base 18: mod_base = um
  modified_base 19: mod_base = OTHER; note = 2'-O-methyladenosine
  modified_base 20: mod_base = gm
  modified_base 21: mod_base = OTHER; note = 2'-O-methyladenosine
  source 1..21: mol_type = other RNA
gagtattgtggaacttataga

SEQ ID NO: 639 - RNA, 21 nt, synthetic construct
  modified_base 1: mod_base = cm
  modified_base 2: mod_base = um
  modified_base 3: mod_base = um
  modified_base 4: mod_base = gm
  modified_base 5: mod_base = OTHER; note = 2'-O-methyladenosine
  modified_base 6: mod_base = OTHER; note = 2'-O-methyladenosine
  modified_base 7: mod_base = cm
  modified_base 8: mod_base = um
  modified_base 9: mod_base = OTHER; note = 2'-fluoroadenosine
  modified_base 10: mod_base = OTHER; note = 2'-fluorocytidine
  modified_base 11: mod_base = OTHER; note = 2'-fluoroadenosine
  modified_base 12: mod_base = um
  modified_base 13: mod_base = cm
  modified_base 14: mod_base = gm
  modified_base 15: mod_base = OTHER; note = 2'-O-methyladenosine
  modified_base 16: mod_base = um
  modified_base 17: mod_base = cm
  modified_base 18: mod_base = OTHER; note = 2'-O-methyladenosine
  modified_base 19: mod_base = um
  modified_base 20: mod_base = gm
  modified_base 21: mod_base = OTHER; note = 2'-O-methyladenosine
  source 1..21: mol_type = other RNA
cttgaactacatcgatcatga

SEQ ID NO: 640 - RNA, 21 nt, synthetic construct
  modified_base 1: mod_base = um
  modified_base 2: mod_base = gm
  modified_base 3: mod_base = gm
  modified_base 4: mod_base = OTHER; note = 2'-O-methyladenosine
  modified_base 5: mod_base = um
  modified_base 6: mod_base = gm
  modified_base 7: mod_base = cm
  modified_base 8: mod_base = um
  modified_base 9: mod_base = OTHER; note = 2'-fluoroguanosine
  modified_base 10: mod_base = OTHER; note = 2'-fluorouridine
  modified_base 11: mod_base = OTHER; note = 2'-fluoroguanosine
  modified_base 12: mod_base = OTHER; note = 2'-O-methyladenosine
  modified_base 13: mod_base = OTHER; note = 2'-O-methyladenosine
  modified_base 14: mod_base = gm
  modified_base 15: mod_base = cm
  modified_base 16: mod_base = um
  modified_base 17: mod_base = um
  modified_base 18: mod_base = um
  modified_base 19: mod_base = gm
  modified_base 20: mod_base = um
  modified_base 21: mod_base = OTHER; note = 2'-O-methyladenosine
  source 1..21: mol_type = other RNA
tggatgctgtgaagctttgta

SEQ ID NO: 641 - RNA, 21 nt, synthetic construct
  modified_base 1: mod_base = cm
  modified_base 2: mod_base = OTHER; note = 2'-O-methyladenosine
  modified_base 3: mod_base = gm
  modified_base 4: mod_base = gm
  modified_base 5: mod_base = um
  modified_base 6: mod_base = cm
  modified_base 7: mod_base = cm
  modified_base 8: mod_base = um
  modified_base 9: mod_base = OTHER; note = 2'-fluoroguanosine
  modified_base 10: mod_base = OTHER; note = 2'-fluorouridine
  modified_base 11: mod_base = OTHER; note = 2'-fluorouridine
  modified_base 12: mod_base = OTHER; note = 2'-O-methyladenosine
  modified_base 13: mod_base = cm
  modified_base 14: mod_base = OTHER; note = 2'-O-methyladenosine
  modified_base 15: mod_base = OTHER; note = 2'-O-methyladenosine
  modified_base 16: mod_base = cm
  modified_base 17: mod_base = OTHER; note = 2'-O-methyladenosine
  modified_base 18: mod_base = OTHER; note = 2'-O-methyladenosine
  modified_base 19: mod_base = gm
  modified_base 20: mod_base = um
  modified_base 21: mod_base = OTHER; note = 2'-O-methyladenosine
  source 1..21: mol_type = other RNA
caggtcctgttacaacaagta

SEQ ID NO: 642 - RNA, 21 nt, synthetic construct
  modified_base 1: mod_base = cm
  modified_base 2: mod_base = OTHER; note = 2'-O-methyladenosine
  modified_base 3: mod_base = OTHER; note = 2'-O-methyladenosine
  modified_base 4: mod_base = cm
  modified_base 5: mod_base = OTHER; note = 2'-O-methyladenosine
  modified_base 6: mod_base = OTHER; note = 2'-O-methyladenosine
  modified_base 7: mod_base = gm
  modified_base 8: mod_base = um
  modified_base 9: mod_base = OTHER; note = 2'-fluoroadenosine
  modified_base 10: mod_base = OTHER; note = 2'-fluoroadenosine
  modified_base 11: mod_base = OTHER; note = 2'-fluoroadenosine
  modified_base 12: mod_base = um
  modified_base 13: mod_base = cm
  modified_base 14: mod_base = cm
  modified_base 15: mod_base = um
  modified_base 16: mod_base = cm
  modified_base 17: mod_base = OTHER; note = 2'-O-methyladenosine
  modified_base 18: mod_base = um
  modified_base 19: mod_base = cm
  modified_base 20: mod_base = OTHER; note = 2'-O-methyladenosine
  modified_base 21: mod_base = OTHER; note = 2'-O-methyladenosine
  source 1..21: mol_type = other RNA
caacaagtaaatcctcatcaa

SEQ ID NO: 643 - RNA, 21 nt, synthetic construct
  modified_base 1: mod_base = cm
  modified_base 2: mod_base = cm
  modified_base 3: mod_base = OTHER; note = 2'-O-methyladenosine
  modified_base 4: mod_base = OTHER; note = 2'-O-methyladenosine
  modified_base 5: mod_base = um
  modified_base 6: mod_base = gm
  modified_base 7: mod_base = OTHER; note = 2'-O-methyladenosine
  modified_base 8: mod_base = um
  modified_base 9: mod_base = OTHER; note = 2'-fluoroguanosine
  modified_base 10: mod_base = OTHER; note = 2'-fluoroguanosine
  modified_base 11: mod_base = OTHER; note = 2'-fluorocytidine
  modified_base 12: mod_base = OTHER; note = 2'-O-methyladenosine
  modified_base 13: mod_base = OTHER; note = 2'-O-methyladenosine
  modified_base 14: mod_base = cm
  modified_base 15: mod_base = um
  modified_base 16: mod_base = gm
  modified_base 17: mod_base = um
  modified_base 18: mod_base = um
  modified_base 19: mod_base = um
  modified_base 20: mod_base = gm
  modified_base 21: mod_base = um
  source 1..21: mol_type = other RNA
ccaatgatggcaactgtttgt

SEQ ID NO: 644 - RNA, 21 nt, synthetic construct
  modified_base 1: mod_base = cm
  modified_base 2: mod_base = OTHER; note = 2'-O-methyladenosine
  modified_base 3: mod_base = gm
  modified_base 4: mod_base = gm
  modified_base 5: mod_base = um
  modified_base 6: mod_base = gm
  modified_base 7: mod_base = um
  modified_base 8: mod_base = um
  modified_base 9: mod_base = OTHER; note = 2'-fluorouridine
  modified_base 10: mod_base = OTHER; note = 2'-fluoroadenosine
  modified_base 11: mod_base = OTHER; note = 2'-fluorouridine
  modified_base 12: mod_base = um
  modified_base 13: mod_base = gm
  modified_base 14: mod_base = gm
  modified_base 15: mod_base = cm
  modified_base 16: mod_base = um
  modified_base 17: mod_base = um
  modified_base 18: mod_base = um
  modified_base 19: mod_base = gm
  modified_base 20: mod_base = um
  modified_base 21: mod_base = OTHER; note = 2'-O-methyladenosine
  source 1..21: mol_type = other RNA
caggtgtttattggctttgta

SEQ ID NO: 645 - RNA, 21 nt, synthetic construct
  modified_base 1: mod_base = OTHER; note = 2'-O-methyladenosine
  modified_base 2: mod_base = OTHER; note = 2'-O-methyladenosine
  modified_base 3: mod_base = gm
  modified_base 4: mod_base = cm
  modified_base 5: mod_base = gm
  modified_base 6: mod_base = OTHER; note = 2'-O-methyladenosine
  modified_base 7: mod_base = cm
  modified_base 8: mod_base = um
  modified_base 9: mod_base = OTHER; note = 2'-fluoroguanosine
  modified_base 10: mod_base = OTHER; note = 2'-fluorouridine
  modified_base 11: mod_base = OTHER; note = 2'-fluorocytidine
  modified_base 12: mod_base = um
  modified_base 13: mod_base = cm
  modified_base 14: mod_base = gm
  modified_base 15: mod_base = OTHER; note = 2'-O-methyladenosine
  modified_base 16: mod_base = cm
  modified_base 17: mod_base = OTHER; note = 2'-O-methyladenosine
  modified_base 18: mod_base = gm
  modified_base 19: mod_base = OTHER; note = 2'-O-methyladenosine
  modified_base 20: mod_base = um
  modified_base 21: mod_base = OTHER; note = 2'-O-methyladenosine
  source 1..21: mol_type = other RNA
aagcgactgtctcgacagata

SEQ ID NO: 646 - RNA, 21 nt, synthetic construct
  modified_base 1: mod_base = um
  modified_base 2: mod_base = cm
  modified_base 3: mod_base = cm
  modified_base 4: mod_base = gm
  modified_base 5: mod_base = um
  modified_base 6: mod_base = gm
  modified_base 7: mod_base = OTHER; note = 2'-O-methyladenosine
  modified_base 8: mod_base = gm
  modified_base 9: mod_base = OTHER; note = 2'-fluorocytidine
  modified_base 10: mod_base = OTHER; note = 2'-fluoroadenosine
  modified_base 11: mod_base = OTHER; note = 2'-fluorocytidine
  modified_base 12: mod_base = um
  modified_base 13: mod_base = gm
  modified_base 14: mod_base = um
  modified_base 15: mod_base = um
  modified_base 16: mod_base = cm
  modified_base 17: mod_base = OTHER; note = 2'-O-methyladenosine
  modified_base 18: mod_base = OTHER; note = 2'-O-methyladenosine
  modified_base 19: mod_base = cm
  modified_base 20: mod_base = um
  modified_base 21: mod_base = OTHER; note = 2'-O-methyladenosine
  source 1..21: mol_type = other RNA
tccgtgagcactgttcaacta

SEQ ID NO: 647 - RNA, 21 nt, synthetic construct
  modified_base 1: mod_base = cm
  modified_base 2: mod_base = cm
  modified_base 3: mod_base = OTHER; note = 2'-O-methyladenosine
  modified_base 4: mod_base = gm
  modified_base 5: mod_base = cm
  modified_base 6: mod_base = OTHER; note = 2'-O-methyladenosine
  modified_base 7: mod_base = cm
  modified_base 8: mod_base = OTHER; note = 2'-O-methyladenosine
  modified_base 9: mod_base = OTHER; note = 2'-fluoroadenosine
  modified_base 10: mod_base = OTHER; note = 2'-fluoroadenosine
  modified_base 11: mod_base = OTHER; note = 2'-fluoroguanosine
  modified_base 12: mod_base = um
  modified_base 13: mod_base = um
  modified_base 14: mod_base = OTHER; note = 2'-O-methyladenosine
  modified_base 15: mod_base = cm
  modified_base 16: mod_base = um
  modified_base 17: mod_base = um
  modified_base 18: mod_base = OTHER; note = 2'-O-methyladenosine
  modified_base 19: mod_base = gm
  modified_base 20: mod_base = um
  modified_base 21: mod_base = OTHER; note = 2'-O-methyladenosine
  source 1..21: mol_type = other RNA
ccagcacaaagttacttagta

SEQ ID NO: 648 - RNA, 21 nt, synthetic construct
  modified_base 1: mod_base = gm
  modified_base 2: mod_base = cm
  modified_base 3: mod_base = OTHER; note = 2'-O-methyladenosine
  modified_base 4: mod_base = gm
  modified_base 5: mod_base = cm
  modified_base 6: mod_base = cm
  modified_base 7: mod_base = OTHER; note = 2'-O-methyladenosine
  modified_base 8: mod_base = OTHER; note = 2'-O-methyladenosine
  modified_base 9: mod_base = OTHER; note = 2'-fluoroadenosine
  modified_base 10: mod_base = OTHER; note = 2'-fluorocytidine
  modified_base 11: mod_base = OTHER; note = 2'-fluorouridine
  modified_base 12: mod_base = um
  modified_base 13: mod_base = gm
  modified_base 14: mod_base = gm
  modified_base 15: mod_base = OTHER; note = 2'-O-methyladenosine
  modified_base 16: mod_base = OTHER; note = 2'-O-methyladenosine
  modified_base 17: mod_base = um
  modified_base 18: mod_base = gm
  modified_base 19: mod_base = um
  modified_base 20: mod_base = gm
  modified_base 21: mod_base = OTHER; note = 2'-O-methyladenosine
  source 1..21: mol_type = other RNA
gcagccaaacttggaatgtga

SEQ ID NO: 649 - RNA, 21 nt, synthetic construct
  modified_base 1: mod_base = gm
  modified_base 2: mod_base = um
  modified_base 3: mod_base = gm
  modified_base 4: mod_base = cm
  modified_base 5: mod_base = OTHER; note = 2'-O-methyladenosine
  modified_base 6: mod_base = OTHER; note = 2'-O-methyladenosine
  modified_base 7: mod_base = um
  modified_base 8: mod_base = OTHER; note = 2'-O-methyladenosine
  modified_base 9: mod_base = OTHER; note = 2'-fluoroguanosine
  modified_base 10: mod_base = OTHER; note = 2'-fluoroadenosine
  modified_base 11: mod_base = OTHER; note = 2'-fluoroguanosine
  modified_base 12: mod_base = OTHER; note = 2'-O-methyladenosine
  modified_base 13: mod_base = OTHER; note = 2'-O-methyladenosine
  modified_base 14: mod_base = OTHER; note = 2'-O-methyladenosine
  modified_base 15: mod_base = um
  modified_base 16: mod_base = OTHER; note = 2'-O-methyladenosine
  modified_base 17: mod_base = gm
  modified_base 18: mod_base = um
  modified_base 19: mod_base = OTHER; note = 2'-O-methyladenosine
  modified_base 20: mod_base = cm
  modified_base 21: mod_base = OTHER; note = 2'-O-methyladenosine
  source 1..21: mol_type = other RNA
gtgcaatagagaaatagtaca

SEQ ID NO: 650 - RNA, 21 nt, synthetic construct
  modified_base 1: mod_base = cm
  modified_base 2: mod_base = um
  modified_base 3: mod_base = gm
  modified_base 4: mod_base = um
  modified_base 5: mod_base = cm
  modified_base 6: mod_base = OTHER; note = 2'-O-methyladenosine
  modified_base 7: mod_base = gm
  modified_base 8: mod_base = OTHER; note = 2'-O-methyladenosine
  modified_base 9: mod_base = OTHER; note = 2'-fluoroadenosine
  modified_base 10: mod_base = OTHER; note = 2'-fluorocytidine
  modified_base 11: mod_base = OTHER; note = 2'-fluorocytidine
  modified_base 12: mod_base = um
  modified_base 13: mod_base = cm
  modified_base 14: mod_base = cm
  modified_base 15: mod_base = OTHER; note = 2'-O-methyladenosine
  modified_base 16: mod_base = um
  modified_base 17: mod_base = gm
  modified_base 18: mod_base = OTHER; note = 2'-O-methyladenosine
  modified_base 19: mod_base = cm
  modified_base 20: mod_base = um
  modified_base 21: mod_base = OTHER; note = 2'-O-methyladenosine
  source 1..21: mol_type = other RNA
ctgtcagaacctccatgacta

SEQ ID NO: 651 - RNA, 21 nt, synthetic construct
  modified_base 1: mod_base = gm
  modified_base 2: mod_base = cm
  modified_base 3: mod_base = um
  modified_base 4: mod_base = cm
  modified_base 5: mod_base = OTHER; note = 2'-O-methyladenosine
  modified_base 6: mod_base = um
  modified_base 7: mod_base = um
  modified_base 8: mod_base = gm
  modified_base 9: mod_base = OTHER; note = 2'-fluorouridine
  modified_base 10: mod_base = OTHER; note = 2'-fluoroadenosine
  modified_base 11: mod_base = OTHER; note = 2'-fluoroadenosine
  modified_base 12: mod_base = OTHER; note = 2'-O-methyladenosine
  modified_base 13: mod_base = um
  modified_base 14: mod_base = cm
  modified_base 15: mod_base = OTHER; note = 2'-O-methyladenosine
  modified_base 16: mod_base = cm
  modified_base 17: mod_base = OTHER; note = 2'-O-methyladenosine
  modified_base 18: mod_base = um
  modified_base 19: mod_base = um
  modified_base 20: mod_base = cm
  modified_base 21: mod_base = OTHER; note = 2'-O-methyladenosine
  source 1..21: mol_type = other RNA
gctcattgtaaatcacattca

SEQ ID NO: 652 - RNA, 21 nt, synthetic construct
  modified_base 1: mod_base = cm
  modified_base 2: mod_base = OTHER; note = 2'-O-methyladenosine
  modified_base 3: mod_base = gm
  modified_base 4: mod_base = um
  modified_base 5: mod_base = OTHER; note = 2'-O-methyladenosine
  modified_base 6: mod_base = cm
  modified_base 7: mod_base = OTHER; note = 2'-O-methyladenosine
  modified_base 8: mod_base = gm
  modified_base 9: mod_base = OTHER; note = 2'-fluoroguanosine
  modified_base 10: mod_base = OTHER; note = 2'-fluoroadenosine
  modified_base 11: mod_base = OTHER; note = 2'-fluorocytidine
  modified_base 12: mod_base = um
  modified_base 13: mod_base = um
  modified_base 14: mod_base = cm
  modified_base 15: mod_base = OTHER; note = 2'-O-methyladenosine
  modified_base 16: mod_base = um
  modified_base 17: mod_base = cm
  modified_base 18: mod_base = OTHER; note = 2'-O-methyladenosine
  modified_base 19: mod_base = gm
  modified_base 20: mod_base = um
  modified_base 21: mod_base = OTHER; note = 2'-O-methyladenosine
  source 1..21: mol_type = other RNA
cagtacaggacttcatcagta

SEQ ID NO: 653 - RNA, 21 nt, synthetic construct
  modified_base 1: mod_base = OTHER; note = 2'-O-methyladenosine
  modified_base 2: mod_base = gm
  modified_base 3: mod_base = gm
  modified_base 4: mod_base = cm
  modified_base 5: mod_base = OTHER; note = 2'-O-methyladenosine
  modified_base 6: mod_base = OTHER; note = 2'-O-methyladenosine
  modified_base 7: mod_base = um
  modified_base 8: mod_base = um
  modified_base 9: mod_base = OTHER; note = 2'-fluorocytidine
  modified_base 10: mod_base = OTHER; note = 2'-fluoroadenosine
  modified_base 11: mod_base = OTHER; note = 2'-fluoroguanosine
  modified_base 12: mod_base = um
  modified_base 13: mod_base = cm
  modified_base 14: mod_base = um
  modified_base 15: mod_base = cm
  modified_base 16: mod_base = gm
  modified_base 17: mod_base = um
  modified_base 18: mod_base = um
  modified_base 19: mod_base = gm
  modified_base 20: mod_base = um
  modified_base 21: mod_base = OTHER; note = 2'-O-methyladenosine
  source 1..21: mol_type = other RNA
aggcaattcagtctcgttgta

SEQ ID NO: 654 - RNA, 21 nt, synthetic construct
  modified_base 1: mod_base = gm
  modified_base 2: mod_base = um
  modified_base 3: mod_base = um
  modified_base 4: mod_base = gm
  modified_base 5: mod_base = cm
  modified_base 6: mod_base = cm
  modified_base 7: mod_base = OTHER; note = 2'-O-methyladenosine
  modified_base 8: mod_base = OTHER; note = 2'-O-methyladenosine
  modified_base 9: mod_base = OTHER; note = 2'-fluorouridine
  modified_base 10: mod_base = OTHER; note = 2'-fluoroguanosine
  modified_base 11: mod_base = OTHER; note = 2'-fluoroguanosine
  modified_base 12: mod_base = OTHER; note = 2'-O-methyladenosine
  modified_base 13: mod_base = OTHER; note = 2'-O-methyladenosine
  modified_base 14: mod_base = gm
  modified_base 15: mod_base = OTHER; note = 2'-O-methyladenosine
  modified_base 16: mod_base = OTHER; note = 2'-O-methyladenosine
  modified_base 17: mod_base = cm
  modified_base 18: mod_base = um
  modified_base 19: mod_base = cm
  modified_base 20: mod_base = OTHER; note = 2'-O-methyladenosine
  modified_base 21: mod_base = OTHER; note = 2'-O-methyladenosine
  source 1..21: mol_type = other RNA
gttgccaatggaagaactcaa

SEQ ID NO: 655 - RNA, 21 nt, synthetic construct
  modified_base 1: mod_base = cm
  modified_base 2: mod_base = cm
  modified_base 3: mod_base = OTHER; note = 2'-O-methyladenosine
  modified_base 4: mod_base = um
  modified_base 5: mod_base = gm
  modified_base 6: mod_base = cm
  modified_base 7: mod_base = OTHER; note = 2'-O-methyladenosine
  modified_base 8: mod_base = OTHER; note = 2'-O-methyladenosine
  modified_base 9: mod_base = OTHER; note = 2'-fluoroguanosine
  modified_base 10: mod_base = OTHER; note = 2'-fluoroadenosine
  modified_base 11: mod_base = OTHER; note = 2'-fluorocytidine
  modified_base 12: mod_base = um
  modified_base 13: mod_base = cm
  modified_base 14: mod_base = OTHER; note = 2'-O-methyladenosine
  modified_base 15: mod_base = cm
  modified_base 16: mod_base = um
  modified_base 17: mod_base = um
  modified_base 18: mod_base = OTHER; note = 2'-O-methyladenosine
  modified_base 19: mod_base = gm
  modified_base 20: mod_base = um
  modified_base 21: mod_base = OTHER; note = 2'-O-methyladenosine
  source 1..21: mol_type = other RNA
ccatgcaagactcacttagta

SEQ ID NO: 656 - RNA, 21 nt, synthetic construct
  modified_base 1: mod_base = OTHER; note = 2'-O-methyladenosine
  modified_base 2: mod_base = gm
  modified_base 3: mod_base = gm
  modified_base 4: mod_base = gm
  modified_base 5: mod_base = OTHER; note = 2'-O-methyladenosine
  modified_base 6: mod_base = um
  modified_base 7: mod_base = gm
  modified_base 8: mod_base = OTHER; note = 2'-O-methyladenosine
  modified_base 9: mod_base = OTHER; note = 2'-fluoroguanosine
  modified_base 10: mod_base = OTHER; note = 2'-fluorouridine
  modified_base 11: mod_base = OTHER; note = 2'-fluoroguanosine
  modified_base 12: mod_base = OTHER; note = 2'-O-methyladenosine
  modified_base 13: mod_base = OTHER; note = 2'-O-methyladenosine
  modified_base 14: mod_base = OTHER; note = 2'-O-methyladenosine
  modified_base 15: mod_base = um
  modified_base 16: mod_base = um
  modified_base 17: mod_base = um
  modified_base 18: mod_base = cm
  modified_base 19: mod_base = um
  modified_base 20: mod_base = gm
  modified_base 21: mod_base = OTHER; note = 2'-O-methyladenosine
  source 1..21: mol_type = other RNA
agggatgagtgaaatttctga

SEQ ID NO: 657 - RNA, 21 nt, synthetic construct
  modified_base 1: mod_base = cm
  modified_base 2: mod_base = um
  modified_base 3: mod_base = gm
  modified_base 4: mod_base = gm
  modified_base 5: mod_base = OTHER; note = 2'-O-methyladenosine
  modified_base 6: mod_base = gm
  modified_base 7: mod_base = cm
  modified_base 8: mod_base = OTHER; note = 2'-O-methyladenosine
  modified_base 9: mod_base = OTHER; note = 2'-fluoroadenosine
  modified_base 10: mod_base = OTHER; note = 2'-fluoroguanosine
  modified_base 11: mod_base = OTHER; note = 2'-fluorouridine
  modified_base 12: mod_base = um
  modified_base 13: mod_base = gm
  modified_base 14: mod_base = OTHER; note = 2'-O-methyladenosine
  modified_base 15: mod_base = OTHER; note = 2'-O-methyladenosine
  modified_base 16: mod_base = um
  modified_base 17: mod_base = gm
  modified_base 18: mod_base = OTHER; note = 2'-O-methyladenosine
  modified_base 19: mod_base = um
  modified_base 20: mod_base = cm
  modified_base 21: mod_base = um
  source 1..21: mol_type = other RNA
ctggagcaagttgaatgatct

SEQ ID NO: 658 - RNA, 21 nt, synthetic construct
  modified_base 1: mod_base = cm
  modified_base 2: mod_base = gm
  modified_base 3: mod_base = OTHER; note = 2'-O-methyladenosine
  modified_base 4: mod_base = cm
  modified_base 5: mod_base = cm
  modified_base 6: mod_base = cm
  modified_base 7: mod_base = um
  modified_base 8: mod_base = gm
  modified_base 9: mod_base = OTHER; note = 2'-fluoroguanosine
  modified_base 10: mod_base = OTHER; note = 2'-fluoroadenosine
  modified_base 11: mod_base = OTHER; note = 2'-fluoroadenosine
  modified_base 12: mod_base = OTHER; note = 2'-O-methyladenosine
  modified_base 13: mod_base = OTHER; note = 2'-O-methyladenosine
  modified_base 14: mod_base = gm
  modified_base 15: mod_base = cm
  modified_base 16: mod_base = um
  modified_base 17: mod_base = OTHER; note = 2'-O-methylinosine
  modified_base 18: mod_base = OTHER; note = 2'-O-methyladenosine
  modified_base 19: mod_base = um
  modified_base 20: mod_base = gm
  modified_base 21: mod_base = OTHER; note = 2'-O-methyladenosine
  source 1..21: mol_type = other RNA
cgaccctggaaaagctnatga

SEQ ID NO: 659 - RNA, 21 nt, synthetic construct
  modified_base 1: mod_base = gm
  modified_base 2: mod_base = cm
  modified_base 3: mod_base = um
  modified_base 4: mod_base = gm
  modified_base 5: mod_base = OTHER; note = 2'-O-methyladenosine
  modified_base 6: mod_base = um
  modified_base 7: mod_base = gm
  modified_base 8: mod_base = OTHER; note = 2'-O-methyladenosine
  modified_base 9: mod_base = OTHER; note = 2'-fluoroadenosine
  modified_base 10: mod_base = OTHER; note = 2'-fluoroguanosine
  modified_base 11: mod_base = OTHER; note = 2'-fluoroguanosine
  modified_base 12: mod_base = cm
  modified_base 13: mod_base = cm
  modified_base 14: mod_base = um
  modified_base 15: mod_base = um
  modified_base 16: mod_base = cm
  modified_base 17: mod_base = OTHER; note = 2'-O-methylinosine
  modified_base 18: mod_base = OTHER; note = 2'-O-methyladenosine
  modified_base 19: mod_base = gm
  modified_base 20: mod_base = um
  modified_base 21: mod_base = OTHER; note = 2'-O-methyladenosine
  source 1..21: mol_type = other RNA
gctgatgaaggccttcnagta

SEQ ID NO: 660 - RNA, 21 nt, synthetic construct
  modified_base 1: mod_base = cm
  modified_base 2: mod_base = gm
  modified_base 3: mod_base = cm
  modified_base 4: mod_base = um
  modified_base 5: mod_base = gm
  modified_base 6: mod_base = cm
  modified_base 7: mod_base = OTHER; note = 2'-O-methyladenosine
  modified_base 8: mod_base = cm
  modified_base 9: mod_base = OTHER; note = 2'-fluorocytidine
  modified_base 10: mod_base = OTHER; note = 2'-fluoroguanosine
  modified_base 11: mod_base = OTHER; note = 2'-fluoroadenosine
  modified_base 12: mod_base = cm
  modified_base 13: mod_base = cm
  modified_base 14: mod_base = OTHER; note = 2'-O-methyladenosine
  modified_base 15: mod_base = OTHER; note = 2'-O-methyladenosine
  modified_base 16: mod_base = OTHER; note = 2'-O-methyladenosine
  modified_base 17: mod_base = gm
  modified_base 18: mod_base = OTHER; note = 2'-O-methyladenosine
  modified_base 19: mod_base = OTHER; note = 2'-O-methyladenosine
  modified_base 20: mod_base = OTHER; note = 2'-O-methyladenosine
  modified_base 21: mod_base = OTHER; note = 2'-O-methyladenosine
  source 1..21: mol_type = other RNA
cgctgcaccgaccaaagaaaa

SEQ ID NO: 661 - RNA, 21 nt, synthetic construct
  modified_base 1: mod_base = gm
  modified_base 2: mod_base = cm
  modified_base 3: mod_base = um
  modified_base 4: mod_base = gm
  modified_base 5: mod_base = cm
  modified_base 6: mod_base = OTHER; note = 2'-O-methyladenosine
  modified_base 7: mod_base = cm
  modified_base 8: mod_base = cm
  modified_base 9: mod_base = OTHER; note = 2'-fluoroguanosine
  modified_base 10: mod_base = OTHER; note = 2'-fluoroadenosine
  modified_base 11: mod_base = OTHER; note = 2'-fluorocytidine
  modified_base 12: mod_base = cm
  modified_base 13: mod_base = OTHER; note = 2'-O-methyladenosine
  modified_base 14: mod_base = OTHER; note = 2'-O-methyladenosine
  modified_base 15: mod_base = OTHER; note = 2'-O-methyladenosine
  modified_base 16: mod_base = gm
  modified_base 17: mod_base = OTHER; note = 2'-O-methyladenosine
  modified_base 18: mod_base = OTHER; note = 2'-O-methyladenosine
  modified_base 19: mod_base = OTHER; note = 2'-O-methyladenosine
  modified_base 20: mod_base = gm
  modified_base 21: mod_base = OTHER; note = 2'-O-methyladenosine
  source 1..21: mol_type = other RNA
gctgcaccgaccaaagaaaga

SEQ ID NO: 662 - RNA, 21 nt, synthetic construct
  modified_base 1: mod_base = cm
  modified_base 2: mod_base = um
  modified_base 3: mod_base = gm
  modified_base 4: mod_base = cm
  modified_base 5: mod_base = OTHER; note = 2'-O-methyladenosine
  modified_base 6: mod_base = cm
  modified_base 7: mod_base = cm
  modified_base 8: mod_base = gm
  modified_base 9: mod_base = OTHER; note = 2'-fluoroadenosine
  modified_base 10: mod_base = OTHER; note = 2'-fluorocytidine
  modified_base 11: mod_base = OTHER; note = 2'-fluorocytidine
  modified_base 12: mod_base = OTHER; note = 2'-O-methyladenosine
  modified_base 13: mod_base = OTHER; note = 2'-O-methyladenosine
  modified_base 14: mod_base = OTHER; note = 2'-O-methyladenosine
  modified_base 15: mod_base = gm
  modified_base 16: mod_base = OTHER; note = 2'-O-methyladenosine
  modified_base 17: mod_base = OTHER; note = 2'-O-methyladenosine
  modified_base 18: mod_base = OTHER; note = 2'-O-methyladenosine
  modified_base 19: mod_base = gm
  modified_base 20: mod_base = OTHER; note = 2'-O-methyladenosine
  modified_base 21: mod_base = OTHER; note = 2'-O-methyladenosine
  source 1..21: mol_type = other RNA
ctgcaccgaccaaagaaagaa

SEQ ID NO: 663 - RNA, 21 nt, synthetic construct
  modified_base 1: mod_base = cm
  modified_base 2: mod_base = um
  modified_base 3: mod_base = gm
  modified_base 4: mod_base = OTHER; note = 2'-O-methyladenosine
  modified_base 5: mod_base = um
  modified_base 6: mod_base = gm
  modified_base 7: mod_base = OTHER; note = 2'-O-methyladenosine
  modified_base 8: mod_base = OTHER; note = 2'-O-methyladenosine
  modified_base 9: mod_base = OTHER; note = 2'-fluoroguanosine
  modified_base 10: mod_base = gm
  modified_base 11: mod_base = OTHER; note = 2'-fluorocytidine
  modified_base 12: mod_base = cm
  modified_base 13: mod_base = um
  modified_base 14: mod_base = um
  modified_base 15: mod_base = cm
  modified_base 16: mod_base = gm
  modified_base 17: mod_base = OTHER; note = 2'-O-methyladenosine
  modified_base 18: mod_base = gm
  modified_base 19: mod_base = um
  modified_base 20: mod_base = cm
  modified_base 21: mod_base = OTHER; note = 2'-O-methyladenosine
  source 1..21: mol_type = other RNA
ctgatgaaggccttcgagtca

SEQ ID NO: 664 - RNA, 21 nt, synthetic construct
  modified_base 1: mod_base = cm
  modified_base 2: mod_base = um
  modified_base 3: mod_base = gm
  modified_base 4: mod_base = OTHER; note = 2'-O-methyladenosine
  modified_base 5: mod_base = um
  modified_base 6: mod_base = gm
  modified_base 7: mod_base = OTHER; note = 2'-fluoroadenosine
  modified_base 8: mod_base = OTHER; note = 2'-O-methyladenosine
  modified_base 9: mod_base = OTHER; note = 2'-fluoroguanosine
  modified_base 10: mod_base = gm
  modified_base 11: mod_base = OTHER; note = 2'-fluorocytidine
  modified_base 12: mod_base = cm
  modified_base 13: mod_base = um
  modified_base 14: mod_base = um
  modified_base 15: mod_base = cm
  modified_base 16: mod_base = gm
  modified_base 17: mod_base = OTHER; note = 2'-O-methyladenosine
  modified_base 18: mod_base = gm
  modified_base 19: mod_base = um
  modified_base 20: mod_base = cm
  modified_base 21: mod_base = OTHER; note = 2'-O-methyladenosine
  source 1..21: mol_type = other RNA
ctgatgaaggccttcgagtca

SEQ ID NO: 665 - RNA, 21 nt, synthetic construct
  modified_base 1: mod_base = cm
  modified_base 2: mod_base = um
  modified_base 3: mod_base = gm
  modified_base 4: mod_base = OTHER; note = 2'-O-methyladenosine
  modified_base 5: mod_base = um
  modified_base 6: mod_base = gm
  modified_base 7: mod_base = OTHER; note = 2'-O-methyladenosine
  modified_base 8: mod_base = OTHER; note = 2'-O-methyladenosine
  modified_base 9: mod_base = OTHER; note = 2'-fluoroguanosine
  modified_base 10: mod_base = gm
  modified_base 11: mod_base = OTHER; note = 2'-fluorocytidine
  modified_base 12: mod_base = OTHER; note = 2'-fluorocytidine
  modified_base 13: mod_base = um
  modified_base 14: mod_base = um
  modified_base 15: mod_base = cm
  modified_base 16: mod_base = gm
  modified_base 17: mod_base = OTHER; note = 2'-O-methyladenosine
  modified_base 18: mod_base = gm
  modified_base 19: mod_base = um
  modified_base 20: mod_base = cm
  modified_base 21: mod_base = OTHER; note = 2'-O-methyladenosine
  source 1..21: mol_type = other RNA
ctgatgaaggccttcgagtca

SEQ ID NO: 666 - RNA, 21 nt, synthetic construct
  modified_base 1: mod_base = cm
  modified_base 2: mod_base = um
  modified_base 3: mod_base = um
  modified_base 4: mod_base = gm
  modified_base 5: mod_base = OTHER; note = 2'-O-methyladenosine
  modified_base 6: mod_base = OTHER; note = 2'-O-methyladenosine
  modified_base 7: mod_base = cm
  modified_base 8: mod_base = um
  modified_base 9: mod_base = OTHER; note = 2'-fluoroadenosine
  modified_base 10: mod_base = cm
  modified_base 11: mod_base = OTHER; note = 2'-fluoroadenosine
  modified_base 12: mod_base = um
  modified_base 13: mod_base = cm
  modified_base 14: mod_base = gm
  modified_base 15: mod_base = OTHER; note = 2'-O-methyladenosine
  modified_base 16: mod_base = um
  modified_base 17: mod_base = cm
  modified_base 18: mod_base = OTHER; note = 2'-O-methyladenosine
  modified_base 19: mod_base = um
  modified_base 20: mod_base = gm
  modified_base 21: mod_base = OTHER; note = 2'-O-methyladenosine
  source 1..21: mol_type = other RNA
cttgaactacatcgatcatga

SEQ ID NO: 667 - RNA, 21 nt, synthetic construct
  modified_base 1: mod_base = cm
  modified_base 2: mod_base = um
  modified_base 3: mod_base = um
  modified_base 4: mod_base = gm
  modified_base 5: mod_base = OTHER; note = 2'-O-methyladenosine
  modified_base 6: mod_base = OTHER; note = 2'-O-methyladenosine
  modified_base 7: mod_base = OTHER; note = 2'-fluorocytidine
  modified_base 8: mod_base = um
  modified_base 9: mod_base = OTHER; note = 2'-fluoroadenosine
  modified_base 10: mod_base = cm
  modified_base 11: mod_base = OTHER; note = 2'-fluoroadenosine
  modified_base 12: mod_base = um
  modified_base 13: mod_base = cm
  modified_base 14: mod_base = gm
  modified_base 15: mod_base = OTHER; note = 2'-O-methyladenosine
  modified_base 16: mod_base = um
  modified_base 17: mod_base = cm
  modified_base 18: mod_base = OTHER; note = 2'-O-methyladenosine
  modified_base 19: mod_base = um
  modified_base 20: mod_base = gm
  modified_base 21: mod_base = OTHER; note = 2'-O-methyladenosine
  source 1..21: mol_type = other RNA
cttgaactacatcgatcatga

SEQ ID NO: 668 - RNA, 21 nt, synthetic construct
  modified_base 1: mod_base = cm
  modified_base 2: mod_base = um
  modified_base 3: mod_base = um
  modified_base 4: mod_base = gm
  modified_base 5: mod_base = OTHER; note = 2'-O-methyladenosine
  modified_base 6: mod_base = OTHER; note = 2'-O-methyladenosine
  modified_base 7: mod_base = cm
  modified_base 8: mod_base = um
  modified_base 9: mod_base = OTHER; note = 2'-fluoroadenosine
  modified_base 10: mod_base = cm
  modified_base 11: mod_base = OTHER; note = 2'-fluoroadenosine
  modified_base 12: mod_base = OTHER; note = 2'-fluorouridine
  modified_base 13: mod_base = cm
  modified_base 14: mod_base = gm
  modified_base 15: mod_base = OTHER; note = 2'-O-methyladenosine
  modified_base 16: mod_base = um
  modified_base 17: mod_base = cm
  modified_base 18: mod_base = OTHER; note = 2'-O-methyladenosine
  modified_base 19: mod_base = um
  modified_base 20: mod_base = gm
  modified_base 21: mod_base = OTHER; note = 2'-O-methyladenosine
  source 1..21: mol_type = other RNA
cttgaactacatcgatcatga

SEQ ID NO: 669 - RNA, 21 nt, synthetic construct
  modified_base 1: mod_base = cm
  modified_base 2: mod_base = um
  modified_base 3: mod_base = gm
  modified_base 4: mod_base = OTHER; note = 2'-O-methyladenosine
  modified_base 5: mod_base = cm
  modified_base 6: mod_base = gm
  modified_base 7: mod_base = um
  modified_base 8: mod_base = um
  modified_base 9: mod_base = OTHER; note = 2'-fluoroadenosine
  modified_base 10: mod_base = cm
  modified_base 11: mod_base = OTHER; note = 2'-fluoroadenosine
  modified_base 12: mod_base = um
  modified_base 13: mod_base = cm
  modified_base 14: mod_base = OTHER; note = 2'-O-methyladenosine
  modified_base 15: mod_base = um
  modified_base 16: mod_base = OTHER; note = 2'-O-methyladenosine
  modified_base 17: mod_base = cm
  modified_base 18: mod_base = OTHER; note = 2'-O-methyladenosine
  modified_base 19: mod_base = cm
  modified_base 20: mod_base = OTHER; note = 2'-O-methyladenosine
  modified_base 21: mod_base = OTHER; note = 2'-O-methyladenosine
  source 1..21: mol_type = other RNA
ctgacgttacatcatacacaa

SEQ ID NO: 670 - RNA, 21 nt, synthetic construct
  modified_base 1: mod_base = cm
  modified_base 2: mod_base = um
  modified_base 3: mod_base = gm
  modified_base 4: mod_base = OTHER; note = 2'-O-methyladenosine
  modified_base 5: mod_base = cm
  modified_base 6: mod_base = gm
  modified_base 7: mod_base = OTHER; note = 2'-fluorouridine
  modified_base 8: mod_base = um
  modified_base 9: mod_base = OTHER; note = 2'-fluoroadenosine
  modified_base 10: mod_base = cm
  modified_base 11: mod_base = OTHER; note = 2'-fluoroadenosine
  modified_base 12: mod_base = um
  modified_base 13: mod_base = cm
  modified_base 14: mod_base = OTHER; note = 2'-O-methyladenosine
  modified_base 15: mod_base = um
  modified_base 16: mod_base = OTHER; note = 2'-O-methyladenosine
  modified_base 17: mod_base = cm
  modified_base 18: mod_base = OTHER; note = 2'-O-methyladenosine
  modified_base 19: mod_base = cm
  modified_base 20: mod_base = OTHER; note = 2'-O-methyladenosine
  modified_base 21: mod_base = OTHER; note = 2'-O-methyladenosine
  source 1..21: mol_type = other RNA
ctgacgttacatcatacacaa

SEQ ID NO: 671 - RNA, 21 nt, synthetic construct
  modified_base 1: mod_base = cm
  modified_base 2: mod_base = um
  modified_base 3: mod_base = gm
  modified_base 4: mod_base = OTHER; note = 2'-O-methyladenosine
  modified_base 5: mod_base = cm
  modified_base 6: mod_base = gm
  modified_base 7: mod_base = um
  modified_base 8: mod_base = um
  modified_base 9: mod_base = OTHER; note = 2'-fluoroadenosine
  modified_base 10: mod_base = cm
  modified_base 11: mod_base = OTHER; note = 2'-fluoroadenosine
  modified_base 12: mod_base = OTHER; note = 2'-fluorouridine
  modified_base 13: mod_base = cm
  modified_base 14: mod_base = OTHER; note = 2'-O-methyladenosine
  modified_base 15: mod_base = um
  modified_base 16: mod_base = OTHER; note = 2'-O-methyladenosine
  modified_base 17: mod_base = cm
  modified_base 18: mod_base = OTHER; note = 2'-O-methyladenosine
  modified_base 19: mod_base = cm
  modified_base 20: mod_base = OTHER; note = 2'-O-methyladenosine
  modified_base 21: mod_base = OTHER; note = 2'-O-methyladenosine
  source 1..21: mol_type = other RNA
ctgacgttacatcatacacaa

SEQ ID NO: 672 - RNA, 21 nt, synthetic construct
  modified_base 1: mod_base = cm
  modified_base 2: mod_base = OTHER; note = 2'-O-methyladenosine
  modified_base 3: mod_base = gm
  modified_base 4: mod_base = gm
  modified_base 5: mod_base = um
  modified_base 6: mod_base = gm
  modified_base 7: mod_base = um
  modified_base 8: mod_base = um
  modified_base 9: mod_base = OTHER; note = 2'-fluorouridine
  modified_base 10: mod_base = OTHER; note = 2'-O-methyladenosine
  modified_base 11: mod_base = OTHER; note = 2'-fluorouridine
  modified_base 12: mod_base = um
  modified_base 13: mod_base = gm
  modified_base 14: mod_base = gm
  modified_base 15: mod_base = cm
  modified_base 16: mod_base = um
  modified_base 17: mod_base = um
  modified_base 18: mod_base = um
  modified_base 19: mod_base = gm
  modified_base 20: mod_base = um
  modified_base 21: mod_base = OTHER; note = 2'-O-methyladenosine
  source 1..21: mol_type = other RNA
caggtgtttattggctttgta

SEQ ID NO: 673 - RNA, 21 nt, synthetic construct
  modified_base 1: mod_base = cm
  modified_base 2: mod_base = OTHER; note = 2'-O-methyladenosine
  modified_base 3: mod_base = gm
  modified_base 4: mod_base = gm
  modified_base 5: mod_base = um
  modified_base 6: mod_base = gm
  modified_base 7: mod_base = OTHER; note = 2'-fluorouridine
  modified_base 8: mod_base = um
  modified_base 9: mod_base = OTHER; note = 2'-fluorouridine
  modified_base 10: mod_base = OTHER; note = 2'-O-methyladenosine
  modified_base 11: mod_base = OTHER; note = 2'-fluorouridine
  modified_base 12: mod_base = um
  modified_base 13: mod_base = gm
  modified_base 14: mod_base = gm
  modified_base 15: mod_base = cm
  modified_base 16: mod_base = um
  modified_base 17: mod_base = um
  modified_base 18: mod_base = um
  modified_base 19: mod_base = gm
  modified_base 20: mod_base = um
  modified_base 21: mod_base = OTHER; note = 2'-O-methyladenosine
  source 1..21: mol_type = other RNA
caggtgtttattggctttgta

SEQ ID NO: 674 - RNA, 21 nt, synthetic construct
  modified_base 1: mod_base = cm
  modified_base 2: mod_base = OTHER; note = 2'-O-methyladenosine
  modified_base 3: mod_base = gm
  modified_base 4: mod_base = gm
  modified_base 5: mod_base = um
  modified_base 6: mod_base = gm
  modified_base 7: mod_base = um
  modified_base 8: mod_base = um
  modified_base 9: mod_base = OTHER; note = 2'-fluorouridine
  modified_base 10: mod_base = OTHER; note = 2'-O-methyladenosine
  modified_base 11: mod_base = OTHER; note = 2'-fluorouridine
  modified_base 12: mod_base = OTHER; note = 2'-fluorouridine
  modified_base 13: mod_base = gm
  modified_base 14: mod_base = gm
  modified_base 15: mod_base = cm
  modified_base 16: mod_base = um
  modified_base 17: mod_base = um
  modified_base 18: mod_base = um
  modified_base 19: mod_base = gm
  modified_base 20: mod_base = um
  modified_base 21: mod_base = OTHER; note = 2'-O-methyladenosine
  source 1..21: mol_type = other RNA
caggtgtttattggctttgta

SEQ ID NO: 675 - RNA, 21 nt, synthetic construct
  modified_base 1: mod_base = OTHER; note = 5'-6-aminohexyl phosphorothioate-inverted abasic deoxyribonucleotide-phosphorothioate-2'-O-methylcytidine
  modified_base 2: mod_base = um
  modified_base 3: mod_base = gm
  modified_base 4: mod_base = OTHER; note = 2'-O-methyladenosine
  modified_base 5: mod_base = cm
  modified_base 6: mod_base = gm
  modified_base 7: mod_base = um
  modified_base 8: mod_base = um
  modified_base 9: mod_base = OTHER; note = 2'-fluoroadenosine
  modified_base 10: mod_base = OTHER; note = 2'-fluorocytidine
  modified_base 11: mod_base = OTHER; note = 2'-fluoroadenosine
  modified_base 12: mod_base = um
  modified_base 13: mod_base = cm
  modified_base 14: mod_base = OTHER; note = 2'-O-methyladenosine
  modified_base 15: mod_base = um
  modified_base 16: mod_base = OTHER; note = 2'-O-methyladenosine
  modified_base 17: mod_base = cm
  modified_base 18: mod_base = OTHER; note = 2'-O-methyladenosine
  modified_base 19: mod_base = cm
  modified_base 20: mod_base = OTHER; note = 2'-O-methyladenosine
  modified_base 21: mod_base = OTHER; note = 2'-O-methyladenosine-phosphorothioate-inverted abasic deoxyribonucleotide
  source 1..21: mol_type = other RNA
ctgacgttacatcatacacaa

SEQ ID NO: 676 - RNA, 21 nt, synthetic construct
  modified_base 1: mod_base = OTHER; note = 5'-6-aminohexyl phosphorothioate-inverted abasic deoxyribonucleotide-phosphorothioate-2'-O-methylcytidine
  modified_base 2: mod_base = um
  modified_base 3: mod_base = um
  modified_base 4: mod_base = gm
  modified_base 5: mod_base = OTHER; note = 2'-O-methyladenosine
  modified_base 6: mod_base = OTHER; note = 2'-O-methyladenosine
  modified_base 7: mod_base = cm
  modified_base 8: mod_base = um
  modified_base 9: mod_base = OTHER; note = 2'-fluoroadenosine
  modified_base 10: mod_base = OTHER; note = 2'-fluorocytidine
  modified_base 11: mod_base = OTHER; note = 2'-fluoroadenosine
  modified_base 12: mod_base = um
  modified_base 13: mod_base = cm
  modified_base 14: mod_base = gm
  modified_base 15: mod_base = OTHER; note = 2'-O-methyladenosine
  modified_base 16: mod_base = um
  modified_base 17: mod_base = cm
  modified_base 18: mod_base = OTHER; note = 2'-O-methyladenosine
  modified_base 19: mod_base = um
  modified_base 20: mod_base = gm
  modified_base 21: mod_base = OTHER; note = 2'-O-methyladenosine-phosphorothioate-inverted abasic deoxyribonucleotide
  source 1..21: mol_type = other RNA
cttgaactacatcgatcatga

SEQ ID NO: 677 - RNA, 21 nt, synthetic construct
  modified_base 1: mod_base = OTHER; note = 5'-6-aminohexyl phosphorothioate-inverted abasic deoxyribonucleotide-phosphorothioate-2'-O-methylcytidine
  modified_base 2: mod_base = OTHER; note = 2'-O-methyladenosine
  modified_base 3: mod_base = gm
  modified_base 4: mod_base = gm
  modified_base 5: mod_base = um
  modified_base 6: mod_base = gm
  modified_base 7: mod_base = um
  modified_base 8: mod_base = um
  modified_base 9: mod_base = OTHER; note = 2'-fluorouridine
  modified_base 10: mod_base = OTHER; note = 2'-fluoroadenosine
  modified_base 11: mod_base = OTHER; note = 2'-fluorouridine
  modified_base 12: mod_base = um
  modified_base 13: mod_base = gm
  modified_base 14: mod_base = gm
  modified_base 15: mod_base = cm
  modified_base 16: mod_base = um
  modified_base 17: mod_base = um
  modified_base 18: mod_base = um
  modified_base 19: mod_base = gm
  modified_base 20: mod_base = um
  modified_base 21: mod_base = OTHER; note = 2'-O-methyladenosine-phosphorothioate-inverted abasic deoxyribonucleotide
  source 1..21: mol_type = other RNA
caggtgtttattggctttgta

SEQ ID NO: 678 - RNA, 21 nt, synthetic construct
  modified_base 1: mod_base = OTHER; note = 5'-6-aminohexyl phosphorothioate-inverted abasic deoxyribonucleotide-phosphorothioate-2'-O-methylcytidine
  modified_base 2: mod_base = um
  modified_base 3: mod_base = gm
  modified_base 4: mod_base = OTHER; note = 2'-O-methyladenosine
  modified_base 5: mod_base = cm
  modified_base 6: mod_base = gm
  modified_base 7: mod_base = um
  modified_base 8: mod_base = um
  modified_base 9: mod_base = OTHER; note = 2'-fluoroadenosine
  modified_base 10: mod_base = OTHER; note = 2'-fluorocytidine
  modified_base 11: mod_base = OTHER; note = 2'-fluoroadenosine
  modified_base 12: mod_base = um
  modified_base 13: mod_base = cm
  modified_base 14: mod_base = OTHER; note = 2'-O-methyladenosine
  modified_base 15: mod_base = um
  modified_base 16: mod_base = OTHER; note = 2'-O-methyladenosine
  modified_base 17: mod_base = cm
  modified_base 18: mod_base = OTHER; note = 2'-O-methyladenosine
  modified_base 19: mod_base = cm
  modified_base 20: mod_base = OTHER; note = 2'-O-methyladenosine
  modified_base 21: mod_base = OTHER; note = 2'-O-methyladenosine-phosphorothioate-inverted abasic deoxyribonucleotide
  source 1..21: mol_type = other RNA
ctgacgttacatcatacacaa

SEQ ID NO: 679 - RNA, 21 nt, synthetic construct
  modified_base 1: mod_base = OTHER; note = 5'-6-aminohexyl phosphorothioate-inverted abasic deoxyribonucleotide-phosphorothioate-2'-O-methylcytidine
  modified_base 2: mod_base = um
  modified_base 3: mod_base = um
  modified_base 4: mod_base = gm
  modified_base 5: mod_base = OTHER; note = 2'-O-methyladenosine
  modified_base 6: mod_base = OTHER; note = 2'-O-methyladenosine
  modified_base 7: mod_base = cm
  modified_base 8: mod_base = um
  modified_base 9: mod_base = OTHER; note = 2'-fluoroadenosine
  modified_base 10: mod_base = OTHER; note = 2'-fluorocytidine
  modified_base 11: mod_base = OTHER; note = 2'-fluoroadenosine
  modified_base 12: mod_base = um
  modified_base 13: mod_base = cm
  modified_base 14: mod_base = gm
  modified_base 15: mod_base = OTHER; note = 2'-O-methyladenosine
  modified_base 16: mod_base = um
  modified_base 17: mod_base = cm
  modified_base 18: mod_base = OTHER; note = 2'-O-methyladenosine
  modified_base 19: mod_base = um
  modified_base 20: mod_base = gm
  modified_base 21: mod_base = OTHER; note = 2'-O-methyladenosine-phosphorothioate-inverted abasic deoxyribonucleotide
  source 1..21: mol_type = other RNA
cttgaactacatcgatcatga

SEQ ID NO: 680 - RNA, 21 nt, synthetic construct
  modified_base 1: mod_base = OTHER; note = 5'-6-aminohexyl phosphorothioate-inverted abasic deoxyribonucleotide-phosphorothioate-2'-O-methylcytidine
  modified_base 2: mod_base = OTHER; note = 2'-O-methyladenosine
  modified_base 3: mod_base = gm
  modified_base 4: mod_base = gm
  modified_base 5: mod_base = um
  modified_base 6: mod_base = gm
  modified_base 7: mod_base = um
  modified_base 8: mod_base = um
  modified_base 9: mod_base = OTHER; note = 2'-fluorouridine
  modified_base 10: mod_base = OTHER; note = 2'-fluoroadenosine
  modified_base 11: mod_base = OTHER; note = 2'-fluorouridine
  modified_base 12: mod_base = um
  modified_base 13: mod_base = gm
  modified_base 14: mod_base = gm
  modified_base 15: mod_base = cm
  modified_base 16: mod_base = um
  modified_base 17: mod_base = um
  modified_base 18: mod_base = um
  modified_base 19: mod_base = gm
  modified_base 20: mod_base = um
  modified_base 21: mod_base = OTHER; note = 2'-O-methyladenosine-phosphorothioate-inverted abasic deoxyribonucleotide
  source 1..21: mol_type = other RNA
caggtgtttattggctttgta

SEQ ID NO: 681 - RNA, 21 nt, synthetic construct
  modified_base 1: mod_base = OTHER; note = 5'-6-aminohexyl phosphorothioate-inverted abasic deoxyribonucleotide-phosphorothioate-2'-O-methyladenosine
  modified_base 2: mod_base = gm
  modified_base 3: mod_base = gm
  modified_base 4: mod_base = cm
  modified_base 5: mod_base = OTHER; note = 2'-O-methyladenosine
  modified_base 6: mod_base = OTHER; note = 2'-O-methyladenosine
  modified_base 7: mod_base = um
  modified_base 8: mod_base = um
  modified_base 9: mod_base = OTHER; note = 2'-fluorocytidine
  modified_base 10: mod_base = OTHER; note = 2'-fluoroadenosine
  modified_base 11: mod_base = OTHER; note = 2'-fluoroguanosine
  modified_base 12: mod_base = um
  modified_base 13: mod_base = cm
  modified_base 14: mod_base = um
  modified_base 15: mod_base = cm
  modified_base 16: mod_base = gm
  modified_base 17: mod_base = um
  modified_base 18: mod_base = um
  modified_base 19: mod_base = gm
  modified_base 20: mod_base = um
  modified_base 21: mod_base = OTHER; note = 2'-O-methyladenosine-phosphorothioate-inverted abasic deoxyribonucleotide
  source 1..21: mol_type = other RNA
aggcaattcagtctcgttgta

SEQ ID NO: 682 - RNA, 21 nt, synthetic construct
  modified_base 1: mod_base = OTHER; note = 5'-6-aminohexyl phosphorothioate-inverted abasic deoxyribonucleotide-phosphorothioate-2'-O-methyladenosine
  modified_base 2: mod_base = gm
  modified_base 3: mod_base = gm
  modified_base 4: mod_base = cm
  modified_base 5: mod_base = OTHER; note = 2'-O-methyladenosine
  modified_base 6: mod_base = OTHER; note = 2'-O-methyladenosine
  modified_base 7: mod_base = um
  modified_base 8: mod_base = um
  modified_base 9: mod_base = OTHER; note = 2'-fluorocytidine
  modified_base 10: mod_base = OTHER; note = 2'-fluoroadenosine
  modified_base 11: mod_base = OTHER; note = 2'-fluoroguanosine
  modified_base 12: mod_base = um
  modified_base 13: mod_base = cm
  modified_base 14: mod_base = um
  modified_base 15: mod_base = cm
  modified_base 16: mod_base = gm
  modified_base 17: mod_base = um
  modified_base 18: mod_base = um
  modified_base 19: mod_base = gm
  modified_base 20: mod_base = um
  modified_base 21: mod_base = OTHER; note = 2'-O-methyladenosine-phosphorothioate-inverted abasic deoxyribonucleotide
  source 1..21: mol_type = other RNA
aggcaattcagtctcgttgta

SEQ ID NO: 683 - RNA, 21 nt, synthetic construct
  modified_base 1: mod_base = OTHER; note = inverted abasic deoxyribonucleotide-phosphorothioate-2'-O-methylcytidine
  modified_base 2: mod_base = um
  modified_base 3: mod_base = gm
  modified_base 4: mod_base = OTHER; note = 2'-O-methyladenosine
  modified_base 5: mod_base = cm
  modified_base 6: mod_base = gm
  modified_base 7: mod_base = um
  modified_base 8: mod_base = um
  modified_base 9: mod_base = OTHER; note = 2'-fluoroadenosine
  modified_base 10: mod_base = OTHER; note = 2'-fluorocytidine
  modified_base 11: mod_base = OTHER; note = 2'-fluoroadenosine
  modified_base 12: mod_base = um
  modified_base 13: mod_base = cm
  modified_base 14: mod_base = OTHER; note = 2'-O-methyladenosine
  modified_base 15: mod_base = um
  modified_base 16: mod_base = OTHER; note = 2'-O-methyladenosine
  modified_base 17: mod_base = cm
  modified_base 18: mod_base = OTHER; note = 2'-O-methyladenosine
  modified_base 19: mod_base = cm
  modified_base 20: mod_base = OTHER; note = 2'-O-methyladenosine
  modified_base 21: mod_base = OTHER; note = 2'-O-methyladenosine-phosphorothioate-inverted abasic deoxyribonucleotide
  source 1..21: mol_type = other RNA
ctgacgttacatcatacacaa

SEQ ID NO: 684 - RNA, 21 nt, synthetic construct
  modified_base 1: mod_base = OTHER; note = inverted abasic deoxyribonucleotide-phosphorothioate-2'-O-methylcytidine
  modified_base 2: mod_base = um
  modified_base 3: mod_base = um
  modified_base 4: mod_base = gm
  modified_base 5: mod_base = OTHER; note = 2'-O-methyladenosine
  modified_base 6: mod_base = OTHER; note = 2'-O-methyladenosine
  modified_base 7: mod_base = cm
  modified_base 8: mod_base = um
  modified_base 9: mod_base = OTHER; note = 2'-fluoroadenosine
  modified_base 10: mod_base = OTHER; note = 2'-fluorocytidine
  modified_base 11: mod_base = OTHER; note = 2'-fluoroadenosine
  modified_base 12: mod_base = um
  modified_base 13: mod_base = cm
  modified_base 14: mod_base = gm
  modified_base 15: mod_base = OTHER; note = 2'-O-methyladenosine
  modified_base 16: mod_base = um
  modified_base 17: mod_base = cm
  modified_base 18: mod_base = OTHER; note = 2'-O-methyladenosine
  modified_base 19: mod_base = um
  modified_base 20: mod_base = gm
  modified_base 21: mod_base = OTHER; note = 2'-O-methyladenosine-phosphorothioate-inverted abasic deoxyribonucleotide
  source 1..21: mol_type = other RNA
cttgaactacatcgatcatga

SEQ ID NO: 685 - RNA, 21 nt, synthetic construct
  modified_base 1: mod_base = OTHER; note = inverted abasic deoxyribonucleotide-phosphorothioate-2'-O-methylcytidine
  modified_base 2: mod_base = OTHER; note = 2'-O-methyladenosine
  modified_base 3: mod_base = gm
  modified_base 4: mod_base = gm
  modified_base 5: mod_base = um
  modified_base 6: mod_base = gm
  modified_base 7: mod_base = um
  modified_base 8: mod_base = um
  modified_base 9: mod_base = OTHER; note = 2'-fluorouridine
  modified_base 10: mod_base = OTHER; note = 2'-fluoroadenosine
  modified_base 11: mod_base = OTHER; note = 2'-fluorouridine
  modified_base 12: mod_base = um
  modified_base 13: mod_base = gm
  modified_base 14: mod_base = gm
  modified_base 15: mod_base = cm
  modified_base 16: mod_base = um
  modified_base 17: mod_base = um
  modified_base 18: mod_base = um
  modified_base 19: mod_base = gm
  modified_base 20: mod_base = um
  modified_base 21: mod_base = OTHER; note = 2'-O-methyladenosine-phosphorothioate-inverted abasic deoxyribonucleotide
  source 1..21: mol_type = other RNA
caggtgtttattggctttgta

SEQ ID NO: 686 - RNA, 21 nt, synthetic construct
  modified_base 1: mod_base = OTHER; note = inverted abasic deoxyribonucleotide-phosphorothioate-2'-O-methyladenosine
  modified_base 2: mod_base = gm
  modified_base 3: mod_base = gm
  modified_base 4: mod_base = cm
  modified_base 5: mod_base = OTHER; note = 2'-O-methyladenosine
  modified_base 6: mod_base = OTHER; note = 2'-O-methyladenosine
  modified_base 7: mod_base = um
  modified_base 8: mod_base = um
  modified_base 9: mod_base = OTHER; note = 2'-fluorocytidine
  modified_base 10: mod_base = OTHER; note = 2'-fluoroadenosine
  modified_base 11: mod_base = OTHER; note = 2'-fluoroguanosine
  modified_base 12: mod_base = um
  modified_base 13: mod_base = cm
  modified_base 14: mod_base = um
  modified_base 15: mod_base = cm
  modified_base 16: mod_base = gm
  modified_base 17: mod_base = um
  modified_base 18: mod_base = um
  modified_base 19: mod_base = gm
  modified_base 20: mod_base = um
  modified_base 21: mod_base = OTHER; note = 2'-O-methyladenosine-phosphorothioate-inverted abasic deoxyribonucleotide
  source 1..21: mol_type = other RNA
aggcaattcagtctcgttgta

SEQ ID NO: 687 - RNA, 21 nt, synthetic construct
  modified_base 1: mod_base = gm
  modified_base 1^2: mod_base = OTHER; note = phosphorothioate linkage
  modified_base 2: mod_base = cm
  modified_base 2^3: mod_base = OTHER; note = phosphorothioate linkage
  modified_base 3: mod_base = gm
  modified_base 4: mod_base = OTHER; note = 2'-O-methyladenosine
  modified_base 5: mod_base = cm
  modified_base 6: mod_base = OTHER; note = 2'-O-hexadecanylcytidine
  modified_base 7: mod_base = OTHER; note = 2'-fluorocytidine
  modified_base 8: mod_base = um
  modified_base 9: mod_base = OTHER; note = 2'-fluoroguanosine
  modified_base 10: mod_base = OTHER; note = 2'-fluoroguanosine
  modified_base 11: mod_base = OTHER; note = 2'-fluoroadenosine
  modified_base 12: mod_base = OTHER; note = 2'-O-methyladenosine
  modified_base 13: mod_base = OTHER; note = 2'-O-methyladenosine
  modified_base 14: mod_base = OTHER; note = 2'-O-methyladenosine
  modified_base 15: mod_base = gm
  modified_base 16: mod_base = cm
  modified_base 17: mod_base = um
  modified_base 18: mod_base = gm
  modified_base 19: mod_base = OTHER; note = 2'-O-methyladenosine
  modified_base 19^20: mod_base = OTHER; note = phosphorothioate linkage
  modified_base 20: mod_base = um
  modified_base 20^21: mod_base = OTHER; note = phosphorothioate linkage
  modified_base 21: mod_base = OTHER; note = 2'-O-methyladenosine
  source 1..21: mol_type = other RNA
gcgaccctggaaaagctgata

SEQ ID NO: 688 - RNA, 21 nt, synthetic construct
  modified_base 1: mod_base = OTHER; note = inverted abasic deoxyribonucleotide-phosphorothioate-2'-O-methylcytidine
  modified_base 2: mod_base = um
  modified_base 3: mod_base = gm
  modified_base 4: mod_base = OTHER; note = 2'-O-methyladenosine
  modified_base 5: mod_base = um
  modified_base 6: mod_base = gm
  modified_base 7: mod_base = OTHER; note = 2'-O-methyladenosine
  modified_base 8: mod_base = OTHER; note = 2'-O-methyladenosine
  modified_base 9: mod_base = OTHER; note = 2'-fluoroguanosine
  modified_base 10: mod_base = OTHER; note = 2'-fluoroguanosine
  modified_base 11: mod_base = OTHER; note = 2'-fluorocytidine
  modified_base 12: mod_base = um
  modified_base 13: mod_base = um
  modified_base 14: mod_base = um
  modified_base 15: mod_base = cm
  modified_base 16: mod_base = gm
  modified_base 17: mod_base = OTHER; note = 2'-O-methyladenosine
  modified_base 18: mod_base = gm
  modified_base 19: mod_base = um
  modified_base 20: mod_base = cm
  modified_base 21: mod_base = OTHER; note = 2'-O-methyladenosine-phosphorothioate-inverted abasic deoxyribonucleotide
  source 1..21: mol_type = other RNA
ctgatgaaggctttcgagtca

SEQ ID NO: 689 - RNA, 21 nt, synthetic construct
  modified_base 1: mod_base = OTHER; note = inverted abasic deoxyribonucleotide-phosphorothioate-2'-O-methylcytidine
  modified_base 2: mod_base = um
  modified_base 3: mod_base = gm
  modified_base 4: mod_base = gm
  modified_base 5: mod_base = OTHER; note = 2'-O-methyladenosine
  modified_base 6: mod_base = gm
  modified_base 7: mod_base = cm
  modified_base 8: mod_base = OTHER; note = 2'-O-methyladenosine
  modified_base 9: mod_base = OTHER; note = 2'-fluoroadenosine
  modified_base 10: mod_base = OTHER; note = 2'-fluoroguanosine
  modified_base 11: mod_base = OTHER; note = 2'-fluorouridine
  modified_base 12: mod_base = um
  modified_base 13: mod_base = gm
  modified_base 14: mod_base = OTHER; note = 2'-O-methyladenosine
  modified_base 15: mod_base = OTHER; note = 2'-O-methyladenosine
  modified_base 16: mod_base = um
  modified_base 17: mod_base = gm
  modified_base 18: mod_base = OTHER; note = 2'-O-methyladenosine
  modified_base 19: mod_base = um
  modified_base 20: mod_base = cm
  modified_base 21: mod_base = OTHER; note = 2'-O-methyladenosine-phosphorothioate-inverted abasic deoxyribonucleotide
  source 1..21: mol_type = other RNA
ctggagcaagttgaatgatca

SEQ ID NO: 690 - RNA, 21 nt, synthetic construct
  modified_base 1: mod_base = OTHER; note = inverted abasic deoxyribonucleotide-phosphorothioate-2'-O-methylcytidine
  modified_base 2: mod_base = um
  modified_base 3: mod_base = gm
  modified_base 4: mod_base = gm
  modified_base 5: mod_base = OTHER; note = 2'-O-methyladenosine
  modified_base 6: mod_base = gm
  modified_base 7: mod_base = cm
  modified_base 8: mod_base = OTHER; note = 2'-O-methyladenosine
  modified_base 9: mod_base = OTHER; note = 2'-fluoroadenosine
  modified_base 10: mod_base = gm
  modified_base 11: mod_base = OTHER; note = 2'-fluorouridine
  modified_base 12: mod_base = um
  modified_base 13: mod_base = gm
  modified_base 14: mod_base = OTHER; note = 2'-O-methyladenosine
  modified_base 15: mod_base = OTHER; note = 2'-O-methyladenosine
  modified_base 16: mod_base = um
  modified_base 17: mod_base = gm
  modified_base 18: mod_base = OTHER; note = 2'-O-methyladenosine
  modified_base 19: mod_base = um
  modified_base 20: mod_base = cm
  modified_base 21: mod_base = OTHER; note = 2'-O-methyluridine-phosphorothioate-inverted abasic deoxyribonucleotide
  source 1..21: mol_type = other RNA
ctggagcaagttgaatgatct

SEQ ID NO: 691 - RNA, 21 nt, synthetic construct
  modified_base 1: mod_base = OTHER; note = inverted abasic deoxyribonucleotide-phosphorothioate-2'-O-methylcytidine
  modified_base 2: mod_base = um
  modified_base 3: mod_base = gm
  modified_base 4: mod_base = gm
  modified_base 5: mod_base = OTHER; note = 2'-O-methyladenosine
  modified_base 6: mod_base = gm
  modified_base 7: mod_base = cm
  modified_base 8: mod_base = OTHER; note = 2'-O-methyladenosine
  modified_base 9: mod_base = OTHER; note = 2'-fluoroadenosine
  modified_base 10: mod_base = gm
  modified_base 11: mod_base = OTHER; note = 2'-fluorouridine
  modified_base 12: mod_base = OTHER; note = 2'-fluorouridine
  modified_base 13: mod_base = gm
  modified_base 14: mod_base = OTHER; note = 2'-O-methyladenosine
  modified_base 15: mod_base = OTHER; note = 2'-O-methyladenosine
  modified_base 16: mod_base = um
  modified_base 17: mod_base = gm
  modified_base 18: mod_base = OTHER; note = 2'-O-methyladenosine
  modified_base 19: mod_base = um
  modified_base 20: mod_base = cm
  modified_base 21: mod_base = OTHER; note = 2'-O-methyluridine-phosphorothioate-inverted abasic deoxyribonucleotide
  source 1..21: mol_type = other RNA
ctggagcaagttgaatgatct

SEQ ID NO: 692 - RNA, 21 nt, synthetic construct
  modified_base 1: mod_base = OTHER; note = inverted abasic deoxyribonucleotide-phosphorothioate-2'-O-methylcytidine
  modified_base 2: mod_base = um
  modified_base 3: mod_base = gm
  modified_base 4: mod_base = gm
  modified_base 5: mod_base = OTHER; note = 2'-O-methyladenosine
  modified_base 6: mod_base = gm
  modified_base 7: mod_base = cm
  modified_base 8: mod_base = OTHER; note = 2'-O-methyladenosine
  modified_base 9: mod_base = OTHER; note = 2'-fluoroadenosine
  modified_base 10: mod_base = gm
  modified_base 11: mod_base = OTHER; note = 2'-fluorouridine
  modified_base 12: mod_base = um
  modified_base 13: mod_base = OTHER; note = 2'-fluoroguanosine
  modified_base 14: mod_base = OTHER; note = 2'-O-methyladenosine
  modified_base 15: mod_base = OTHER; note = 2'-O-methyladenosine
  modified_base 16: mod_base = um
  modified_base 17: mod_base = gm
  modified_base 18: mod_base = OTHER; note = 2'-O-methyladenosine
  modified_base 19: mod_base = um
  modified_base 20: mod_base = cm
  modified_base 21: mod_base = OTHER; note = 2'-O-methyluridine-phosphorothioate-inverted abasic deoxyribonucleotide
  source 1..21: mol_type = other RNA
ctggagcaagttgaatgatct

SEQ ID NO: 693 - RNA, 21 nt, synthetic construct
  modified_base 1: mod_base = OTHER; note = inverted abasic deoxyribonucleotide-phosphorothioate-2'-O-methylcytidine
  modified_base 2: mod_base = um
  modified_base 3: mod_base = gm
  modified_base 4: mod_base = gm
  modified_base 5: mod_base = OTHER; note = 2'-O-methyladenosine
  modified_base 6: mod_base = gm
  modified_base 7: mod_base = cm
  modified_base 8: mod_base = OTHER; note = 2'-O-methyladenosine
  modified_base 9: mod_base = OTHER; note = 2'-fluoroadenosine
  modified_base 10: mod_base = OTHER; note = 2'-fluoroguanosine
  modified_base 11: mod_base = OTHER; note = 2'-fluorouridine
  modified_base 12: mod_base = um
  modified_base 13: mod_base = gm
  modified_base 14: mod_base = OTHER; note = 2'-O-methyladenosine
  modified_base 15: mod_base = OTHER; note = 2'-O-methyladenosine
  modified_base 16: mod_base = um
  modified_base 17: mod_base = gm
  modified_base 18: mod_base = OTHER; note = 2'-O-methyladenosine
  modified_base 19: mod_base = um
  modified_base 20: mod_base = um
  modified_base 21: mod_base = OTHER; note = 2'-O-methyluridine-phosphorothioate-inverted abasic deoxyribonucleotide
  source 1..21: mol_type = other RNA
ctggagcaagttgaatgattt

SEQ ID NO: 694 - RNA, 21 nt, synthetic construct
  modified_base 1: mod_base = OTHER; note = inverted abasic deoxyribonucleotide-phosphorothioate-2'-O-methyladenosine
  modified_base 2: mod_base = gm
  modified_base 3: mod_base = gm
  modified_base 4: mod_base = cm
  modified_base 5: mod_base = OTHER; note = 2'-O-methyladenosine
  modified_base 6: mod_base = OTHER; note = 2'-O-methyladenosine
  modified_base 7: mod_base = um
  modified_base 8: mod_base = um
  modified_base 9: mod_base = OTHER; note = 2'-fluorocytidine
  modified_base 10: mod_base = OTHER; note = 2'-O-methyladenosine
  modified_base 11: mod_base = OTHER; note = 2'-fluoroguanosine
  modified_base 12: mod_base = um
  modified_base 13: mod_base = cm
  modified_base 14: mod_base = um
  modified_base 15: mod_base = cm
  modified_base 16: mod_base = gm
  modified_base 17: mod_base = um
  modified_base 18: mod_base = um
  modified_base 19: mod_base = gm
  modified_base 20: mod_base = um
  modified_base 21: mod_base = OTHER; note = 2'-O-methyladenosine-phosphorothioate-inverted abasic deoxyribonucleotide
  source 1..21: mol_type = other RNA
aggcaattcagtctcgttgta

SEQ ID NO: 695 - RNA, 21 nt, synthetic construct
  modified_base 1: mod_base = OTHER; note = inverted abasic deoxyribonucleotide-phosphorothioate-2'-O-methyladenosine
  modified_base 2: mod_base = gm
  modified_base 3: mod_base = gm
  modified_base 4: mod_base = cm
  modified_base 5: mod_base = OTHER; note = 2'-O-methyladenosine
  modified_base 6: mod_base = OTHER; note = 2'-O-methyladenosine
  modified_base 7: mod_base = um
  modified_base 8: mod_base = um
  modified_base 9: mod_base = OTHER; note = 2'-fluorocytidine
  modified_base 10: mod_base = OTHER; note = 2'-O-methyladenosine
  modified_base 11: mod_base = OTHER; note = 2'-fluoroguanosine
  modified_base 12: mod_base = OTHER; note = 2'-fluorouridine
  modified_base 13: mod_base = cm
  modified_base 14: mod_base = um
  modified_base 15: mod_base = cm
  modified_base 16: mod_base = gm
  modified_base 17: mod_base = um
  modified_base 18: mod_base = um
  modified_base 19: mod_base = gm
  modified_base 20: mod_base = um
  modified_base 21: mod_base = OTHER; note = 2'-O-methyladenosine-phosphorothioate-inverted abasic deoxyribonucleotide
  source 1..21: mol_type = other RNA
aggcaattcagtctcgttgta

SEQ ID NO: 696 - RNA, 21 nt, synthetic construct
  modified_base 1: mod_base = OTHER; note = inverted abasic deoxyribonucleotide-phosphorothioate-2'-O-methyladenosine
  modified_base 2: mod_base = gm
  modified_base 3: mod_base = gm
  modified_base 4: mod_base = cm
  modified_base 5: mod_base = OTHER; note = 2'-O-methyladenosine
  modified_base 6: mod_base = OTHER; note = 2'-O-methyladenosine
  modified_base 7: mod_base = um
  modified_base 8: mod_base = um
  modified_base 9: mod_base = OTHER; note = 2'-fluorocytidine
  modified_base 10: mod_base = OTHER; note = 2'-O-methyladenosine
  modified_base 11: mod_base = OTHER; note = 2'-fluoroguanosine
  modified_base 12: mod_base = um
  modified_base 13: mod_base = OTHER; note = 2'-fluorocytidine
  modified_base 14: mod_base = um
  modified_base 15: mod_base = cm
  modified_base 16: mod_base = gm
  modified_base 17: mod_base = um
  modified_base 18: mod_base = um
  modified_base 19: mod_base = gm
  modified_base 20: mod_base = um
  modified_base 21: mod_base = OTHER; note = 2'-O-methyladenosine-phosphorothioate-inverted abasic deoxyribonucleotide
  source 1..21: mol_type = other RNA
aggcaattcagtctcgttgta

SEQ ID NO: 697 - RNA, 21 nt, synthetic construct
  modified_base 1: mod_base = OTHER; note = inverted abasic deoxyribonucleotide-phosphorothioate-2'-O-methyladenosine
  modified_base 2: mod_base = gm
  modified_base 3: mod_base = gm
  modified_base 4: mod_base = cm
  modified_base 5: mod_base = OTHER; note = 2'-O-methyladenosine
  modified_base 6: mod_base = OTHER; note = 2'-O-methyladenosine
  modified_base 7: mod_base = um
  modified_base 8: mod_base = um
  modified_base 9: mod_base = OTHER; note = 2'-fluorocytidine
  modified_base 10: mod_base = OTHER; note = 2'-fluoroadenosine
  modified_base 11: mod_base = OTHER; note = 2'-fluoroguanosine
  modified_base 12: mod_base = um
  modified_base 13: mod_base = cm
  modified_base 14: mod_base = um
  modified_base 15: mod_base = um
  modified_base 16: mod_base = gm
  modified_base 17: mod_base = um
  modified_base 18: mod_base = um
  modified_base 19: mod_base = gm
  modified_base 20: mod_base = um
  modified_base 21: mod_base = OTHER; note = 2'-O-methyladenosine-phosphorothioate-inverted abasic deoxyribonucleotide
  source 1..21: mol_type = other RNA
aggcaattcagtcttgttgta

SEQ ID NO: 698 - RNA, 21 nt, synthetic construct
  modified_base 1: mod_base = OTHER; note = inverted abasic deoxyribonucleotide-phosphorothioate-2'-O-methyladenosine
  modified_base 2: mod_base = gm
  modified_base 3: mod_base = gm
  modified_base 4: mod_base = um
  modified_base 5: mod_base = OTHER; note = 2'-O-methyladenosine
  modified_base 6: mod_base = OTHER; note = 2'-O-methyladenosine
  modified_base 7: mod_base = um
  modified_base 8: mod_base = um
  modified_base 9: mod_base = OTHER; note = 2'-fluorocytidine
  modified_base 10: mod_base = OTHER; note = 2'-fluoroadenosine
  modified_base 11: mod_base = OTHER; note = 2'-fluoroguanosine
  modified_base 12: mod_base = um
  modified_base 13: mod_base = cm
  modified_base 14: mod_base = um
  modified_base 15: mod_base = cm
  modified_base 16: mod_base = gm
  modified_base 17: mod_base = um
  modified_base 18: mod_base = um
  modified_base 19: mod_base = gm
  modified_base 20: mod_base = um
  modified_base 21: mod_base = OTHER; note = 2'-O-methyladenosine-phosphorothioate-inverted abasic deoxyribonucleotide
  source 1..21: mol_type = other RNA
aggtaattcagtctcgttgta

SEQ ID NO: 699 - RNA, 21 nt, synthetic construct
  modified_base 1: mod_base = OTHER; note = inverted abasic deoxyribonucleotide-phosphorothioate-2'-O-methyladenosine
  modified_base 2: mod_base = gm
  modified_base 3: mod_base = gm
  modified_base 4: mod_base = cm
  modified_base 5: mod_base = OTHER; note = 2'-O-methyladenosine
  modified_base 6: mod_base = OTHER; note = 2'-O-methyladenosine
  modified_base 7: mod_base = um
  modified_base 8: mod_base = um
  modified_base 9: mod_base = OTHER; note = 2'-fluorocytidine
  modified_base 10: mod_base = OTHER; note = 2'-fluoroadenosine
  modified_base 11: mod_base = OTHER; note = 2'-fluoroguanosine
  modified_base 12: mod_base = um
  modified_base 13: mod_base = um
  modified_base 14: mod_base = um
  modified_base 15: mod_base = cm
  modified_base 16: mod_base = gm
  modified_base 17: mod_base = um
  modified_base 18: mod_base = um
  modified_base 19: mod_base = gm
  modified_base 20: mod_base = um
  modified_base 21: mod_base = OTHER; note = 2'-O-methyladenosine-phosphorothioate-inverted abasic deoxyribonucleotide
  source 1..21: mol_type = other RNA
aggcaattcagtttcgttgta

SEQ ID NO: 700 - RNA, 21 nt, synthetic construct
  modified_base 1: mod_base = OTHER; note = inverted abasic deoxyribonucleotide-phosphorothioate-2'-O-methylcytidine
  modified_base 2: mod_base = cm
  modified_base 3: mod_base = OTHER; note = 2'-O-methyladenosine
  modified_base 4: mod_base = um
  modified_base 5: mod_base = gm
  modified_base 6: mod_base = cm
  modified_base 7: mod_base = OTHER; note = 2'-O-methyladenosine
  modified_base 8: mod_base = OTHER; note = 2'-O-methyladenosine
  modified_base 9: mod_base = OTHER; note = 2'-fluoroguanosine
  modified_base 10: mod_base = OTHER; note = 2'-O-methyladenosine
  modified_base 11: mod_base = OTHER; note = 2'-fluorocytidine
  modified_base 12: mod_base = um
  modified_base 13: mod_base = cm
  modified_base 14: mod_base = OTHER; note = 2'-O-methyladenosine
  modified_base 15: mod_base = cm
  modified_base 16: mod_base = um
  modified_base 17: mod_base = um
  modified_base 18: mod_base = OTHER; note = 2'-O-methyladenosine
  modified_base 19: mod_base = gm
  modified_base 20: mod_base = um
  modified_base 21: mod_base = OTHER; note = 2'-O-methyladenosine-phosphorothioate-inverted abasic deoxyribonucleotide
  source 1..21: mol_type = other RNA
ccatgcaagactcacttagta

SEQ ID NO: 701 - RNA, 21 nt, synthetic construct
  modified_base 1: mod_base = OTHER; note = inverted abasic deoxyribonucleotide-phosphorothioate-2'-O-methylcytidine
  modified_base 2: mod_base = cm
  modified_base 3: mod_base = OTHER; note = 2'-O-methyladenosine
  modified_base 4: mod_base = um
  modified_base 5: mod_base = gm
  modified_base 6: mod_base = cm
  modified_base 7: mod_base = OTHER; note = 2'-O-methyladenosine
  modified_base 8: mod_base = OTHER; note = 2'-O-methyladenosine
  modified_base 9: mod_base = OTHER; note = 2'-fluoroguanosine
  modified_base 10: mod_base = OTHER; note = 2'-O-methyladenosine
  modified_base 11: mod_base = OTHER; note = 2'-fluorocytidine
  modified_base 12: mod_base = OTHER; note = 2'-fluorouridine
  modified_base 13: mod_base = cm
  modified_base 14: mod_base = OTHER; note = 2'-O-methyladenosine
  modified_base 15: mod_base = cm
  modified_base 16: mod_base = um
  modified_base 17: mod_base = um
  modified_base 18: mod_base = OTHER; note = 2'-O-methyladenosine
  modified_base 19: mod_base = gm
  modified_base 20: mod_base = um
  modified_base 21: mod_base = OTHER; note = 2'-O-methyladenosine-phosphorothioate-inverted abasic deoxyribonucleotide
  source 1..21: mol_type = other RNA
ccatgcaagactcacttagta

SEQ ID NO: 702 - RNA, 21 nt, synthetic construct
  modified_base 1: mod_base = OTHER; note = inverted abasic deoxyribonucleotide-phosphorothioate-2'-O-methylcytidine
  modified_base 2: mod_base = cm
  modified_base 3: mod_base = OTHER; note = 2'-O-methyladenosine
  modified_base 4: mod_base = um
  modified_base 5: mod_base = gm
  modified_base 6: mod_base = cm
  modified_base 7: mod_base = OTHER; note = 2'-O-methyladenosine
  modified_base 8: mod_base = OTHER; note = 2'-O-methyladenosine
  modified_base 9: mod_base = OTHER; note = 2'-fluoroguanosine
  modified_base 10: mod_base = OTHER; note = 2'-O-methyladenosine
  modified_base 11: mod_base = OTHER; note = 2'-fluorocytidine
  modified_base 12: mod_base = um
  modified_base 13: mod_base = OTHER; note = 2'-fluorocytidine
  modified_base 14: mod_base = OTHER; note = 2'-O-methyladenosine
  modified_base 15: mod_base = cm
  modified_base 16: mod_base = um
  modified_base 17: mod_base = um
  modified_base 18: mod_base = OTHER; note = 2'-O-methyladenosine
  modified_base 19: mod_base = gm
  modified_base 20: mod_base = um
  modified_base 21: mod_base = OTHER; note = 2'-O-methyladenosine-phosphorothioate-inverted abasic deoxyribonucleotide
  source 1..21: mol_type = other RNA
ccatgcaagactcacttagta

SEQ ID NO: 703 - RNA, 21 nt, synthetic construct
  modified_base 1: mod_base = OTHER; note = inverted abasic deoxyribonucleotide-phosphorothioate-2'-O-methylcytidine
  modified_base 2: mod_base = cm
  modified_base 3: mod_base = OTHER; note = 2'-O-methyladenosine
  modified_base 4: mod_base = um
  modified_base 5: mod_base = gm
  modified_base 6: mod_base = um
  modified_base 7: mod_base = OTHER; note = 2'-O-methyladenosine
  modified_base 8: mod_base = OTHER; note = 2'-O-methyladenosine
  modified_base 9: mod_base = OTHER; note = 2'-fluoroguanosine
  modified_base 10: mod_base = OTHER; note = 2'-fluoroadenosine
  modified_base 11: mod_base = OTHER; note = 2'-fluorocytidine
  modified_base 12: mod_base = um
  modified_base 13: mod_base = cm
  modified_base 14: mod_base = OTHER; note = 2'-O-methyladenosine
  modified_base 15: mod_base = cm
  modified_base 16: mod_base = um
  modified_base 17: mod_base = um
  modified_base 18: mod_base = OTHER; note = 2'-O-methyladenosine
  modified_base 19: mod_base = gm
  modified_base 20: mod_base = um
  modified_base 21: mod_base = OTHER; note = 2'-O-methyladenosine-phosphorothioate-inverted abasic deoxyribonucleotide
  source 1..21: mol_type = other RNA
ccatgtaagactcacttagta

SEQ ID NO: 704 - RNA, 21 nt, synthetic construct
  modified_base 1: mod_base = OTHER; note = inverted abasic deoxyribonucleotide-phosphorothioate-2'-O-methylcytidine
  modified_base 2: mod_base = cm
  modified_base 3: mod_base = OTHER; note = 2'-O-methyladenosine
  modified_base 4: mod_base = um
  modified_base 5: mod_base = gm
  modified_base 6: mod_base = cm
  modified_base 7: mod_base = OTHER; note = 2'-O-methyladenosine
  modified_base 8: mod_base = OTHER; note = 2'-O-methyladenosine
  modified_base 9: mod_base = OTHER; note = 2'-fluoroguanosine
  modified_base 10: mod_base = OTHER; note = 2'-fluoroadenosine
  modified_base 11: mod_base = OTHER; note = 2'-fluorocytidine
  modified_base 12: mod_base = um
  modified_base 13: mod_base = cm
  modified_base 14: mod_base = OTHER; note = 2'-O-methyladenosine
  modified_base 15: mod_base = um
  modified_base 16: mod_base = um
  modified_base 17: mod_base = um
  modified_base 18: mod_base = OTHER; note = 2'-O-methyladenosine
  modified_base 19: mod_base = gm
  modified_base 20: mod_base = um
  modified_base 21: mod_base = OTHER; note = 2'-O-methyladenosine-phosphorothioate-inverted abasic deoxyribonucleotide
  source 1..21: mol_type = other RNA
ccatgcaagactcatttagta

SEQ ID NO: 705 - RNA, 21 nt, synthetic construct
  modified_base 1: mod_base = OTHER; note = inverted abasic deoxyribonucleotide-phosphorothioate-2'-O-methylcytidine
  modified_base 2: mod_base = cm
  modified_base 3: mod_base = OTHER; note = 2'-O-methyladenosine
  modified_base 4: mod_base = um
  modified_base 5: mod_base = gm
  modified_base 6: mod_base = cm
  modified_base 7: mod_base = OTHER; note = 2'-O-methyladenosine
  modified_base 8: mod_base = OTHER; note = 2'-O-methyladenosine
  modified_base 9: mod_base = OTHER; note = 2'-fluoroguanosine
  modified_base 10: mod_base = OTHER; note = 2'-fluoroadenosine
  modified_base 11: mod_base = OTHER; note = 2'-fluorocytidine
  modified_base 12: mod_base = um
  modified_base 13: mod_base = um
  modified_base 14: mod_base = OTHER; note = 2'-O-methyladenosine
  modified_base 15: mod_base = cm
  modified_base 16: mod_base = um
  modified_base 17: mod_base = um
  modified_base 18: mod_base = OTHER; note = 2'-O-methyladenosine
  modified_base 19: mod_base = gm
  modified_base 20: mod_base = um
  modified_base 21: mod_base = OTHER; note = 2'-O-methyladenosine-phosphorothioate-inverted abasic deoxyribonucleotide
  source 1..21: mol_type = other RNA
ccatgcaagacttacttagta

SEQ ID NO: 706 - RNA, 21 nt, synthetic construct
  modified_base 1: mod_base = OTHER; note = 5'-6-aminohexyl phosphorothioate-inverted abasic deoxyribonucleotide-phosphorothioate-2'-O-methylcytidine
  modified_base 2: mod_base = um
  modified_base 3: mod_base = gm
  modified_base 4: mod_base = OTHER; note = 2'-O-methyladenosine
  modified_base 5: mod_base = um
  modified_base 6: mod_base = gm
  modified_base 7: mod_base = OTHER; note = 2'-O-methyladenosine
  modified_base 8: mod_base = OTHER; note = 2'-O-methyladenosine
  modified_base 9: mod_base = OTHER; note = 2'-fluoroguanosine
  modified_base 10: mod_base = OTHER; note = 2'-fluoroguanosine
  modified_base 11: mod_base = OTHER; note = 2'-fluorocytidine
  modified_base 12: mod_base = cm
  modified_base 13: mod_base = um
  modified_base 14: mod_base = um
  modified_base 15: mod_base = cm
  modified_base 16: mod_base = gm
  modified_base 17: mod_base = OTHER; note = 2'-O-methyladenosine
  modified_base 18: mod_base = gm
  modified_base 19: mod_base = um
  modified_base 20: mod_base = cm
  modified_base 21: mod_base = OTHER; note = 2'-O-methyladenosine-phosphorothioate-inverted abasic deoxyribonucleotide
  source 1..21: mol_type = other RNA
ctgatgaaggccttcgagtca

SEQ ID NO: 707 - RNA, 21 nt, synthetic construct
  modified_base 1: mod_base = OTHER; note = 5'-6-aminohexyl phosphorothioate-inverted abasic deoxyribonucleotide-phosphorothioate-2'-O-methylcytidine
  modified_base 2: mod_base = cm
  modified_base 3: mod_base = OTHER; note = 2'-O-methyladenosine
  modified_base 4: mod_base = gm
  modified_base 5: mod_base = cm
  modified_base 6: mod_base = OTHER; note = 2'-O-methyladenosine
  modified_base 7: mod_base = cm
  modified_base 8: mod_base = OTHER; note = 2'-O-methyladenosine
  modified_base 9: mod_base = OTHER; note = 2'-fluoroadenosine
  modified_base 10: mod_base = OTHER; note = 2'-fluoroadenosine
  modified_base 11: mod_base = OTHER; note = 2'-fluoroguanosine
  modified_base 12: mod_base = um
  modified_base 13: mod_base = um
  modified_base 14: mod_base = OTHER; note = 2'-O-methyladenosine
  modified_base 15: mod_base = cm
  modified_base 16: mod_base = um
  modified_base 17: mod_base = um
  modified_base 18: mod_base = OTHER; note = 2'-O-methyladenosine
  modified_base 19: mod_base = gm
  modified_base 20: mod_base = um
  modified_base 21: mod_base = OTHER; note = 2'-O-methyladenosine-phosphorothioate-inverted abasic deoxyribonucleotide
  source 1..21: mol_type = other RNA
ccagcacaaagttacttagta

SEQ ID NO: 708 - RNA, 21 nt, synthetic construct
  modified_base 1: mod_base = OTHER; note = 5'-6-aminohexyl phosphorothioate-inverted abasic deoxyribonucleotide-phosphorothioate-2'-O-methylcytidine
  modified_base 2: mod_base = OTHER; note = 2'-O-methyladenosine
  modified_base 3: mod_base = gm
  modified_base 4: mod_base = um
  modified_base 5: mod_base = OTHER; note = 2'-O-methyladenosine
  modified_base 6: mod_base = cm
  modified_base 7: mod_base = OTHER; note = 2'-O-methyladenosine
  modified_base 8: mod_base = gm
  modified_base 9: mod_base = OTHER; note = 2'-fluoroguanosine
  modified_base 10: mod_base = OTHER; note = 2'-fluoroadenosine
  modified_base 11: mod_base = OTHER; note = 2'-fluorocytidine
  modified_base 12: mod_base = um
  modified_base 13: mod_base = um
  modified_base 14: mod_base = cm
  modified_base 15: mod_base = OTHER; note = 2'-O-methyladenosine
  modified_base 16: mod_base = um
  modified_base 17: mod_base = cm
  modified_base 18: mod_base = OTHER; note = 2'-O-methyladenosine
  modified_base 19: mod_base = gm
  modified_base 20: mod_base = um
  modified_base 21: mod_base = OTHER; note = 2'-O-methyladenosine-phosphorothioate-inverted abasic deoxyribonucleotide
  source 1..21: mol_type = other RNA
cagtacaggacttcatcagta

SEQ ID NO: 709 - RNA, 21 nt, synthetic construct
  modified_base 1: mod_base = OTHER; note = 5'-6-aminohexyl phosphorothioate-inverted abasic deoxyribonucleotide-phosphorothioate-2'-O-methylcytidine
  modified_base 2: mod_base = cm
  modified_base 3: mod_base = OTHER; note = 2'-O-methyladenosine
  modified_base 4: mod_base = um
  modified_base 5: mod_base = gm
  modified_base 6: mod_base = cm
  modified_base 7: mod_base = OTHER; note = 2'-O-methyladenosine
  modified_base 8: mod_base = OTHER; note = 2'-O-methyladenosine
  modified_base 9: mod_base = OTHER; note = 2'-fluoroguanosine
  modified_base 10: mod_base = OTHER; note = 2'-fluoroadenosine
  modified_base 11: mod_base = OTHER; note = 2'-fluorocytidine
  modified_base 12: mod_base = um
  modified_base 13: mod_base = cm
  modified_base 14: mod_base = OTHER; note = 2'-O-methyladenosine
  modified_base 15: mod_base = cm
  modified_base 16: mod_base = um
  modified_base 17: mod_base = um
  modified_base 18: mod_base = OTHER; note = 2'-O-methyladenosine
  modified_base 19: mod_base = gm
  modified_base 20: mod_base = um
  modified_base 21: mod_base = OTHER; note = 2'-O-methyladenosine-phosphorothioate-inverted abasic deoxyribonucleotide
  source 1..21: mol_type = other RNA
ccatgcaagactcacttagta

SEQ ID NO: 710 - RNA, 21 nt, synthetic construct
  modified_base 1: mod_base = OTHER; note = 5'-6-aminohexyl phosphorothioate-inverted abasic deoxyribonucleotide-phosphorothioate-2'-O-methylcytidine
  modified_base 2: mod_base = um
  modified_base 3: mod_base = gm
  modified_base 4: mod_base = gm
  modified_base 5: mod_base = OTHER; note = 2'-O-methyladenosine
  modified_base 6: mod_base = gm
  modified_base 7: mod_base = cm
  modified_base 8: mod_base = OTHER; note = 2'-O-methyladenosine
  modified_base 9: mod_base = OTHER; note = 2'-fluoroadenosine
  modified_base 10: mod_base = OTHER; note = 2'-fluoroguanosine
  modified_base 11: mod_base = OTHER; note = 2'-fluorouridine
  modified_base 12: mod_base = um
  modified_base 13: mod_base = gm
  modified_base 14: mod_base = OTHER; note = 2'-O-methyladenosine
  modified_base 15: mod_base = OTHER; note = 2'-O-methyladenosine
  modified_base 16: mod_base = um
  modified_base 17: mod_base = gm
  modified_base 18: mod_base = OTHER; note = 2'-O-methyladenosine
  modified_base 19: mod_base = um
  modified_base 20: mod_base = cm
  modified_base 21: mod_base = OTHER; note = 2'-O-methyluridine-phosphorothioate-inverted abasic deoxyribonucleotide
  source 1..21: mol_type = other RNA
ctggagcaagttgaatgatct

SEQ ID NO: 711 - RNA, 21 nt, synthetic construct
  modified_base 1: mod_base = OTHER; note = inverted abasic deoxyribonucleotide-phosphorothioate-2'-O-methylcytidine
  modified_base 2: mod_base = um
  modified_base 3: mod_base = gm
  modified_base 4: mod_base = OTHER; note = 2'-O-methyladenosine
  modified_base 5: mod_base = um
  modified_base 6: mod_base = gm
  modified_base 7: mod_base = OTHER; note = 2'-O-methyladenosine
  modified_base 8: mod_base = OTHER; note = 2'-O-methyladenosine
  modified_base 9: mod_base = OTHER; note = 2'-fluoroguanosine
  modified_base 10: mod_base = OTHER; note = 2'-fluoroguanosine
  modified_base 11: mod_base = OTHER; note = 2'-fluorocytidine
  modified_base 12: mod_base = cm
  modified_base 13: mod_base = um
  modified_base 14: mod_base = um
  modified_base 15: mod_base = cm
  modified_base 16: mod_base = gm
  modified_base 17: mod_base = OTHER; note = 2'-O-methyladenosine
  modified_base 18: mod_base = gm
  modified_base 19: mod_base = um
  modified_base 20: mod_base = cm
  modified_base 21: mod_base = OTHER; note = 2'-O-methyladenosine-phosphorothioate-inverted abasic deoxyribonucleotide
  source 1..21: mol_type = other RNA
ctgatgaaggccttcgagtca

SEQ ID NO: 712 - RNA, 21 nt, synthetic construct
  modified_base 1: mod_base = OTHER; note = inverted abasic deoxyribonucleotide-phosphorothioate-2'-O-methylcytidine
  modified_base 2: mod_base = cm
  modified_base 3: mod_base = OTHER; note = 2'-O-methyladenosine
  modified_base 4: mod_base = gm
  modified_base 5: mod_base = cm
  modified_base 6: mod_base = OTHER; note = 2'-O-methyladenosine
  modified_base 7: mod_base = cm
  modified_base 8: mod_base = OTHER; note = 2'-O-methyladenosine
  modified_base 9: mod_base = OTHER; note = 2'-fluoroadenosine
  modified_base 10: mod_base = OTHER; note = 2'-fluoroadenosine
  modified_base 11: mod_base = OTHER; note = 2'-fluoroguanosine
  modified_base 12: mod_base = um
  modified_base 13: mod_base = um
  modified_base 14: mod_base = OTHER; note = 2'-O-methyladenosine
  modified_base 15: mod_base = cm
  modified_base 16: mod_base = um
  modified_base 17: mod_base = um
  modified_base 18: mod_base = OTHER; note = 2'-O-methyladenosine
  modified_base 19: mod_base = gm
  modified_base 20: mod_base = um
  modified_base 21: mod_base = OTHER; note = 2'-O-methyladenosine-phosphorothioate-inverted abasic deoxyribonucleotide
  source 1..21: mol_type = other RNA
ccagcacaaagttacttagta

SEQ ID NO: 713 - RNA, 21 nt, synthetic construct
  modified_base 1: mod_base = OTHER; note = inverted abasic deoxyribonucleotide-phosphorothioate-2'-O-methylcytidine
  modified_base 2: mod_base = OTHER; note = 2'-O-methyladenosine
  modified_base 3: mod_base = gm
  modified_base 4: mod_base = um
  modified_base 5: mod_base = OTHER; note = 2'-O-methyladenosine
  modified_base 6: mod_base = cm
  modified_base 7: mod_base = OTHER; note = 2'-O-methyladenosine
  modified_base 8: mod_base = gm
  modified_base 9: mod_base = OTHER; note = 2'-fluoroguanosine
  modified_base 10: mod_base = OTHER; note = 2'-fluoroadenosine
  modified_base 11: mod_base = OTHER; note = 2'-fluorocytidine
  modified_base 12: mod_base = um
  modified_base 13: mod_base = um
  modified_base 14: mod_base = cm
  modified_base 15: mod_base = OTHER; note = 2'-O-methyladenosine
  modified_base 16: mod_base = um
  modified_base 17: mod_base = cm
  modified_base 18: mod_base = OTHER; note = 2'-O-methyladenosine
  modified_base 19: mod_base = gm
  modified_base 20: mod_base = um
  modified_base 21: mod_base = OTHER; note = 2'-O-methyladenosine-phosphorothioate-inverted abasic deoxyribonucleotide
  source 1..21: mol_type = other RNA
cagtacaggacttcatcagta

SEQ ID NO: 714 - RNA, 21 nt, synthetic construct
  modified_base 1: mod_base = OTHER; note = inverted abasic deoxyribonucleotide-phosphorothioate-2'-O-methylcytidine
  modified_base 2: mod_base = cm
  modified_base 3: mod_base = OTHER; note = 2'-O-methyladenosine
  modified_base 4: mod_base = um
  modified_base 5: mod_base = gm
  modified_base 6: mod_base = cm
  modified_base 7: mod_base = OTHER; note = 2'-O-methyladenosine
  modified_base 8: mod_base = OTHER; note = 2'-O-methyladenosine
  modified_base 9: mod_base = OTHER; note = 2'-fluoroguanosine
  modified_base 10: mod_base = OTHER; note = 2'-fluoroadenosine
  modified_base 11: mod_base = OTHER; note = 2'-fluorocytidine
  modified_base 12: mod_base = um
  modified_base 13: mod_base = cm
  modified_base 14: mod_base = OTHER; note = 2'-O-methyladenosine
  modified_base 15: mod_base = cm
  modified_base 16: mod_base = um
  modified_base 17: mod_base = um
  modified_base 18: mod_base = OTHER; note = 2'-O-methyladenosine
  modified_base 19: mod_base = gm
  modified_base 20: mod_base = um
  modified_base 21: mod_base = OTHER; note = 2'-O-methyladenosine-phosphorothioate-inverted abasic deoxyribonucleotide
  source 1..21: mol_type = other RNA
ccatgcaagactcacttagta

SEQ ID NO: 715 - RNA, 21 nt, synthetic construct
  modified_base 1: mod_base = OTHER; note = inverted abasic deoxyribonucleotide-phosphorothioate-2'-O-methylcytidine
  modified_base 2: mod_base = um
  modified_base 3: mod_base = gm
  modified_base 4: mod_base = gm
  modified_base 5: mod_base = OTHER; note = 2'-O-methyladenosine
  modified_base 6: mod_base = gm
  modified_base 7: mod_base = cm
  modified_base 8: mod_base = OTHER; note = 2'-O-methyladenosine
  modified_base 9: mod_base = OTHER; note = 2'-fluoroadenosine
  modified_base 10: mod_base = OTHER; note = 2'-fluoroguanosine
  modified_base 11: mod_base = OTHER; note = 2'-fluorouridine
  modified_base 12: mod_base = um
  modified_base 13: mod_base = gm
  modified_base 14: mod_base = OTHER; note = 2'-O-methyladenosine
  modified_base 15: mod_base = OTHER; note = 2'-O-methyladenosine
  modified_base 16: mod_base = um
  modified_base 17: mod_base = gm
  modified_base 18: mod_base = OTHER; note = 2'-O-methyladenosine
  modified_base 19: mod_base = um
  modified_base 20: mod_base = cm
  modified_base 21: mod_base = OTHER; note = 2'-O-methyluridine-phosphorothioate-inverted abasic deoxyribonucleotide
  source 1..21: mol_type = other RNA
ctggagcaagttgaatgatct

SEQ ID NO: 716 - RNA, 21 nt, synthetic construct
  modified_base 1: mod_base = OTHER; note = inverted abasic deoxyribonucleotide-phosphorothioate-2'-O-methylcytidine
  modified_base 2: mod_base = um
  modified_base 3: mod_base = gm
  modified_base 4: mod_base = gm
  modified_base 5: mod_base = OTHER; note = 2'-O-methyladenosine
  modified_base 6: mod_base = gm
  modified_base 7: mod_base = cm
  modified_base 8: mod_base = OTHER; note = 2'-O-methyladenosine
  modified_base 9: mod_base = OTHER; note = 2'-fluoroadenosine
  modified_base 10: mod_base = gm
  modified_base 11: mod_base = OTHER; note = 2'-fluorouridine
  modified_base 12: mod_base = um
  modified_base 13: mod_base = OTHER; note = 2'-fluoroguanosine
  modified_base 14: mod_base = OTHER; note = 2'-O-methyladenosine
  modified_base 15: mod_base = OTHER; note = 2'-O-methyladenosine
  modified_base 16: mod_base = um
  modified_base 17: mod_base = gm
  modified_base 18: mod_base = OTHER; note = 2'-O-methyladenosine
  modified_base 19: mod_base = um
  modified_base 20: mod_base = cm
  modified_base 21: mod_base = OTHER; note = 2'-O-methyladenosine-phosphorothioate-inverted abasic deoxyribonucleotide
  source 1..21: mol_type = other RNA
ctggagcaagttgaatgatca

SEQ ID NO: 717 - RNA, 21 nt, synthetic construct
  modified_base 1: mod_base = OTHER; note = inverted abasic deoxyribonucleotide-phosphorothioate-2'-O-methylcytidine
  modified_base 2: mod_base = um
  modified_base 3: mod_base = gm
  modified_base 4: mod_base = gm
  modified_base 5: mod_base = OTHER; note = 2'-O-methyladenosine
  modified_base 6: mod_base = gm
  modified_base 7: mod_base = cm
  modified_base 8: mod_base = OTHER; note = 2'-O-methyladenosine
  modified_base 9: mod_base = OTHER; note = 2'-fluoroadenosine
  modified_base 10: mod_base = gm
  modified_base 11: mod_base = OTHER; note = 2'-fluorouridine
  modified_base 12: mod_base = um
  modified_base 13: mod_base = OTHER; note = 2'-fluoroguanosine
  modified_base 14: mod_base = OTHER; note = 2'-O-methyladenosine
  modified_base 15: mod_base = OTHER; note = 2'-O-methyladenosine
  modified_base 16: mod_base = um
  modified_base 17: mod_base = gm
  modified_base 18: mod_base = OTHER; note = 2'-O-methyladenosine
  modified_base 19: mod_base = um
  modified_base 20: mod_base = um
  modified_base 21: mod_base = OTHER; note = 2'-O-methyladenosine-phosphorothioate-inverted abasic deoxyribonucleotide
  source 1..21: mol_type = other RNA
ctggagcaagttgaatgatta

SEQ ID NO: 718 - RNA, 21 nt, synthetic construct
  modified_base 1: mod_base = OTHER; note = inverted abasic deoxyribonucleotide-phosphorothioate-2'-O-methyladenosine
  modified_base 2: mod_base = gm
  modified_base 3: mod_base = gm
  modified_base 4: mod_base = um
  modified_base 5: mod_base = OTHER; note = 2'-O-methyladenosine
  modified_base 6: mod_base = OTHER; note = 2'-O-methyladenosine
  modified_base 7: mod_base = um
  modified_base 8: mod_base = um
  modified_base 9: mod_base = OTHER; note = 2'-fluorocytidine
  modified_base 10: mod_base = OTHER; note = 2'-O-methyladenosine
  modified_base 11: mod_base = OTHER; note = 2'-fluoroguanosine
  modified_base 12: mod_base = um
  modified_base 13: mod_base = OTHER; note = 2'-fluorocytidine
  modified_base 14: mod_base = um
  modified_base 15: mod_base = cm
  modified_base 16: mod_base = gm
  modified_base 17: mod_base = um
  modified_base 18: mod_base = um
  modified_base 19: mod_base = gm
  modified_base 20: mod_base = um
  modified_base 21: mod_base = OTHER; note = 2'-O-methyladenosine-phosphorothioate-inverted abasic deoxyribonucleotide
  source 1..21: mol_type = other RNA
aggtaattcagtctcgttgta

SEQ ID NO: 719 - RNA, 21 nt, synthetic construct
  modified_base 1: mod_base = OTHER; note = inverted abasic deoxyribonucleotide-phosphorothioate-2'-O-methylcytidine
  modified_base 2: mod_base = cm
  modified_base 3: mod_base = OTHER; note = 2'-O-methyladenosine
  modified_base 4: mod_base = um
  modified_base 5: mod_base = gm
  modified_base 6: mod_base = cm
  modified_base 7: mod_base = OTHER; note = 2'-O-methyladenosine
  modified_base 8: mod_base = OTHER; note = 2'-O-methyladenosine
  modified_base 9: mod_base = OTHER; note = 2'-fluoroguanosine
  modified_base 10: mod_base = OTHER; note = 2'-O-methyladenosine
  modified_base 11: mod_base = OTHER; note = 2'-fluorocytidine
  modified_base 12: mod_base = OTHER; note = 2'-fluorouridine
  modified_base 13: mod_base = um
  modified_base 14: mod_base = OTHER; note = 2'-O-methyladenosine
  modified_base 15: mod_base = cm
  modified_base 16: mod_base = um
  modified_base 17: mod_base = um
  modified_base 18: mod_base = OTHER; note = 2'-O-methyladenosine
  modified_base 19: mod_base = gm
  modified_base 20: mod_base = um
  modified_base 21: mod_base = OTHER; note = 2'-O-methyladenosine-phosphorothioate-inverted abasic deoxyribonucleotide
  source 1..21: mol_type = other RNA
ccatgcaagacttacttagta

SEQ ID NO: 720 - RNA, 21 nt, synthetic construct
  modified_base 1: mod_base = OTHER; note = 5'-6-aminohexyl phosphorothioate-inverted abasic deoxyribonucleotide-phosphorothioate-2'-O-methyladenosine
  modified_base 2: mod_base = gm
  modified_base 3: mod_base = gm
  modified_base 4: mod_base = cm
  modified_base 5: mod_base = OTHER; note = 2'-O-methyladenosine
  modified_base 6: mod_base = OTHER; note = 2'-O-methyladenosine
  modified_base 7: mod_base = um
  modified_base 8: mod_base = um
  modified_base 9: mod_base = OTHER; note = 2'-fluorocytidine
  modified_base 10: mod_base = OTHER; note = 2'-O-methyladenosine
  modified_base 11: mod_base = OTHER; note = 2'-fluoroguanosine
  modified_base 12: mod_base = um
  modified_base 13: mod_base = OTHER; note = 2'-fluorocytidine
  modified_base 14: mod_base = um
  modified_base 15: mod_base = cm
  modified_base 16: mod_base = gm
  modified_base 17: mod_base = um
  modified_base 18: mod_base = um
  modified_base 19: mod_base = gm
  modified_base 20: mod_base = um
  modified_base 21: mod_base = OTHER; note = 2'-O-methyladenosine-phosphorothioate-inverted abasic deoxyribonucleotide
  source 1..21: mol_type = other RNA
aggcaattcagtctcgttgta

SEQ ID NO: 721 - RNA, 21 nt, synthetic construct
  modified_base 1: mod_base = OTHER; note = 5'-6-aminohexyl phosphorothioate-inverted abasic deoxyribonucleotide-phosphorothioate-2'-O-methylcytidine
  modified_base 2: mod_base = um
  modified_base 3: mod_base = gm
  modified_base 4: mod_base = gm
  modified_base 5: mod_base = OTHER; note = 2'-O-methyladenosine
  modified_base 6: mod_base = gm
  modified_base 7: mod_base = cm
  modified_base 8: mod_base = OTHER; note = 2'-O-methyladenosine
  modified_base 9: mod_base = OTHER; note = 2'-fluoroadenosine
  modified_base 10: mod_base = gm
  modified_base 11: mod_base = OTHER; note = 2'-fluorouridine
  modified_base 12: mod_base = um
  modified_base 13: mod_base = OTHER; note = 2'-fluoroguanosine
  modified_base 14: mod_base = OTHER; note = 2'-O-methyladenosine
  modified_base 15: mod_base = OTHER; note = 2'-O-methyladenosine
  modified_base 16: mod_base = um
  modified_base 17: mod_base = gm
  modified_base 18: mod_base = OTHER; note = 2'-O-methyladenosine
  modified_base 19: mod_base = um
  modified_base 20: mod_base = cm
  modified_base 21: mod_base = OTHER; note = 2'-O-methyladenosine-phosphorothioate-inverted abasic deoxyribonucleotide
  source 1..21: mol_type = other RNA
ctggagcaagttgaatgatca

SEQ ID NO: 722 - RNA, 21 nt, synthetic construct
  modified_base 1: mod_base = OTHER; note = 5'-6-aminohexyl phosphorothioate-inverted abasic deoxyribonucleotide-phosphorothioate-2'-O-methylcytidine
  modified_base 2: mod_base = cm
  modified_base 3: mod_base = OTHER; note = 2'-O-methyladenosine
  modified_base 4: mod_base = um
  modified_base 5: mod_base = gm
  modified_base 6: mod_base = cm
  modified_base 7: mod_base = OTHER; note = 2'-O-methyladenosine
  modified_base 8: mod_base = OTHER; note = 2'-O-methyladenosine
  modified_base 9: mod_base = OTHER; note = 2'-fluoroguanosine
  modified_base 10: mod_base = OTHER; note = 2'-O-methyladenosine
  modified_base 11: mod_base = OTHER; note = 2'-fluorocytidine
  modified_base 12: mod_base = OTHER; note = 2'-fluorouridine
  modified_base 13: mod_base = cm
  modified_base 14: mod_base = OTHER; note = 2'-O-methyladenosine
  modified_base 15: mod_base = cm
  modified_base 16: mod_base = um
  modified_base 17: mod_base = um
  modified_base 18: mod_base = OTHER; note = 2'-O-methyladenosine
  modified_base 19: mod_base = gm
  modified_base 20: mod_base = um
  modified_base 21: mod_base = OTHER; note = 2'-O-methyladenosine-phosphorothioate-inverted abasic deoxyribonucleotide
  source 1..21: mol_type = other RNA
ccatgcaagactcacttagta

SEQ ID NO: 723 - RNA, 21 nt, synthetic construct
  modified_base 1: mod_base = OTHER; note = inverted abasic deoxyribonucleotide-phosphorothioate-2'-O-methyladenosine
  modified_base 2: mod_base = gm
  modified_base 3: mod_base = gm
  modified_base 4: mod_base = cm
  modified_base 5: mod_base = OTHER; note = 2'-O-methyladenosine
  modified_base 6: mod_base = OTHER; note = 2'-O-methyladenosine
  modified_base 7: mod_base = um
  modified_base 8: mod_base = um
  modified_base 9: mod_base = OTHER; note = 2'-fluorocytidine
  modified_base 10: mod_base = OTHER; note = 2'-fluoroadenosine
  modified_base 11: mod_base = OTHER; note = 2'-fluoroguanosine
  modified_base 12: mod_base = um
  modified_base 13: mod_base = cm
  modified_base 14: mod_base = um
  modified_base 15: mod_base = cm
  modified_base 16: mod_base = gm
  modified_base 17: mod_base = um
  modified_base 18: mod_base = um
  modified_base 19: mod_base = gm
  modified_base 20: mod_base = um
  modified_base 21: mod_base = OTHER; note = 2'-O-methyladenosine-phosphorothioate-inverted abasic deoxyribonucleotide
  source 1..21: mol_type = other RNA
aggcaattcagtctcgttgta

SEQ ID NO: 724 - RNA, 21 nt, synthetic construct
  modified_base 1: mod_base = OTHER; note = inverted abasic deoxyribonucleotide-phosphorothioate-2'-O-methylcytidine
  modified_base 2: mod_base = um
  modified_base 3: mod_base = gm
  modified_base 4: mod_base = gm
  modified_base 5: mod_base = OTHER; note = 2'-O-methyladenosine
  modified_base 6: mod_base = gm
  modified_base 7: mod_base = cm
  modified_base 8: mod_base = OTHER; note = 2'-O-methyladenosine
  modified_base 9: mod_base = OTHER; note = 2'-fluoroadenosine
  modified_base 10: mod_base = OTHER; note = 2'-fluoroguanosine
  modified_base 11: mod_base = OTHER; note = 2'-fluorouridine
  modified_base 12: mod_base = um
  modified_base 13: mod_base = gm
  modified_base 14: mod_base = OTHER; note = 2'-O-methyladenosine
  modified_base 15: mod_base = OTHER; note = 2'-O-methyladenosine
  modified_base 16: mod_base = um
  modified_base 17: mod_base = gm
  modified_base 18: mod_base = OTHER; note = 2'-O-methyladenosine
  modified_base 19: mod_base = um
  modified_base 20: mod_base = cm
  modified_base 21: mod_base = OTHER; note = 2'-O-methyluridine-phosphorothioate-inverted abasic deoxyribonucleotide
  source 1..21: mol_type = other RNA
ctggagcaagttgaatgatct

SEQ ID NO: 725 - RNA, 21 nt, synthetic construct
  modified_base 1: mod_base = OTHER; note = inverted abasic deoxyribonucleotide-phosphorothioate-2'-O-methyladenosine
  modified_base 2: mod_base = gm
  modified_base 3: mod_base = gm
  modified_base 4: mod_base = cm
  modified_base 5: mod_base = OTHER; note = 2'-O-methyladenosine
  modified_base 6: mod_base = OTHER; note = 2'-O-methyladenosine
  modified_base 7: mod_base = um
  modified_base 8: mod_base = um
  modified_base 9: mod_base = OTHER; note = 2'-fluorocytidine
  modified_base 10: mod_base = OTHER; note = 2'-O-methyladenosine
  modified_base 11: mod_base = OTHER; note = 2'-fluoroguanosine
  modified_base 12: mod_base = um
  modified_base 13: mod_base = OTHER; note = 2'-fluorocytidine
  modified_base 14: mod_base = um
  modified_base 15: mod_base = cm
  modified_base 16: mod_base = gm
  modified_base 17: mod_base = um
  modified_base 18: mod_base = um
  modified_base 19: mod_base = gm
  modified_base 20: mod_base = um
  modified_base 21: mod_base = OTHER; note = 2'-O-methyladenosine-phosphorothioate-inverted abasic deoxyribonucleotide
  source 1..21: mol_type = other RNA
aggcaattcagtctcgttgta

SEQ ID NO: 726 - RNA, 21 nt, synthetic construct
  modified_base 1: mod_base = OTHER; note = inverted abasic deoxyribonucleotide-phosphorothioate-2'-O-methylcytidine
  modified_base 2: mod_base = um
  modified_base 3: mod_base = gm
  modified_base 4: mod_base = gm
  modified_base 5: mod_base = OTHER; note = 2'-O-methyladenosine
  modified_base 6: mod_base = gm
  modified_base 7: mod_base = cm
  modified_base 8: mod_base = OTHER; note = 2'-O-methyladenosine
  modified_base 9: mod_base = OTHER; note = 2'-fluoroadenosine
  modified_base 10: mod_base = gm
  modified_base 11: mod_base = OTHER; note = 2'-fluorouridine
  modified_base 12: mod_base = um
  modified_base 13: mod_base = OTHER; note = 2'-fluoroguanosine
  modified_base 14: mod_base = OTHER; note = 2'-O-methyladenosine
  modified_base 15: mod_base = OTHER; note = 2'-O-methyladenosine
  modified_base 16: mod_base = um
  modified_base 17: mod_base = gm
  modified_base 18: mod_base = OTHER; note = 2'-O-methyladenosine
  modified_base 19: mod_base = um
  modified_base 20: mod_base = cm
  modified_base 21: mod_base = OTHER; note = 2'-O-methyladenosine-phosphorothioate-inverted abasic deoxyribonucleotide
  source 1..21: mol_type = other RNA
ctggagcaagttgaatgatca

SEQ ID NO: 727 - RNA, 21 nt, synthetic construct
  modified_base 1: mod_base = OTHER; note = inverted abasic deoxyribonucleotide-phosphorothioate-2'-O-methyladenosine
  modified_base 2: mod_base = gm
  modified_base 3: mod_base = gm
  modified_base 4: mod_base = cm
  modified_base 5: mod_base = OTHER; note = 2'-O-methyladenosine
  modified_base 6: mod_base = OTHER; note = 2'-O-methyladenosine
  modified_base 7: mod_base = um
  modified_base 8: mod_base = um
  modified_base 9: mod_base = OTHER; note = 2'-fluorocytidine
  modified_base 10: mod_base = OTHER; note = 2'-O-methyladenosine
  modified_base 11: mod_base = OTHER; note = 2'-fluoroguanosine
  modified_base 12: mod_base = um
  modified_base 13: mod_base = OTHER; note = 2'-fluorocytidine
  modified_base 14: mod_base = um
  modified_base 15: mod_base = cm
  modified_base 16: mod_base = gm
  modified_base 17: mod_base = um
  modified_base 18: mod_base = um
  modified_base 19: mod_base = gm
  modified_base 20: mod_base = um
  modified_base 21: mod_base = OTHER; note = 2'-O-methyladenosine-phosphorothioate-inverted abasic deoxyribonucleotide
  source 1..21: mol_type = other RNA
aggcaattcagtctcgttgta

SEQ ID NO: 728 - RNA, 21 nt, synthetic construct
  modified_base 1: mod_base = OTHER; note = inverted abasic deoxyribonucleotide-phosphorothioate-2'-O-methylcytidine
  modified_base 2: mod_base = cm
  modified_base 3: mod_base = OTHER; note = 2'-O-methyladenosine
  modified_base 4: mod_base = um
  modified_base 5: mod_base = gm
  modified_base 6: mod_base = cm
  modified_base 7: mod_base = OTHER; note = 2'-O-methyladenosine
  modified_base 8: mod_base = OTHER; note = 2'-O-methyladenosine
  modified_base 9: mod_base = OTHER; note = 2'-fluoroguanosine
  modified_base 10: mod_base = OTHER; note = 2'-O-methyladenosine
  modified_base 11: mod_base = OTHER; note = 2'-fluorocytidine
  modified_base 12: mod_base = OTHER; note = 2'-fluorouridine
  modified_base 13: mod_base = cm
  modified_base 14: mod_base = OTHER; note = 2'-O-methyladenosine
  modified_base 15: mod_base = cm
  modified_base 16: mod_base = um
  modified_base 17: mod_base = um
  modified_base 18: mod_base = OTHER; note = 2'-O-methyladenosine
  modified_base 19: mod_base = gm
  modified_base 20: mod_base = um
  modified_base 21: mod_base = OTHER; note = 2'-O-methyladenosine-phosphorothioate-inverted abasic deoxyribonucleotide
  source 1..21: mol_type = other RNA
ccatgcaagactcacttagta

SEQ ID NO: 729 - RNA, 21 nt, synthetic construct
  modified_base 1: mod_base = OTHER; note = inverted abasic deoxyribonucleotide-phosphorothioate-2'-O-methylcytidine
  modified_base 2: mod_base = um
  modified_base 3: mod_base = gm
  modified_base 4: mod_base = gm
  modified_base 5: mod_base = OTHER; note = 2'-O-methyladenosine
  modified_base 6: mod_base = gm
  modified_base 7: mod_base = cm
  modified_base 8: mod_base = OTHER; note = 2'-O-methyladenosine
  modified_base 9: mod_base = OTHER; note = 2'-fluoroadenosine
  modified_base 10: mod_base = gm
  modified_base 11: mod_base = OTHER; note = 2'-fluorouridine
  modified_base 12: mod_base = um
  modified_base 13: mod_base = OTHER; note = 2'-fluoroguanosine
  modified_base 14: mod_base = OTHER; note = 2'-O-methyladenosine
  modified_base 15: mod_base = OTHER; note = 2'-O-methyladenosine
  modified_base 16: mod_base = um
  modified_base 17: mod_base = gm
  modified_base 18: mod_base = OTHER; note = 2'-O-methyladenosine
  modified_base 19: mod_base = um
  modified_base 20: mod_base = cm
  modified_base 21: mod_base = OTHER; note = 2'-O-methyladenosine-phosphorothioate-inverted abasic deoxyribonucleotide
  source 1..21: mol_type = other RNA
ctggagcaagttgaatgatca

SEQ ID NO: 730 - RNA, 21 nt, synthetic construct
  modified_base 1: mod_base = OTHER; note = inverted abasic deoxyribonucleotide-phosphorothioate-2'-O-methyladenosine
  modified_base 2: mod_base = gm
  modified_base 3: mod_base = gm
  modified_base 4: mod_base = cm
  modified_base 5: mod_base = OTHER; note = 2'-O-methyladenosine
  modified_base 6: mod_base = OTHER; note = 2'-O-methyladenosine
  modified_base 7: mod_base = um
  modified_base 8: mod_base = um
  modified_base 9: mod_base = OTHER; note = 2'-fluorocytidine
  modified_base 10: mod_base = OTHER; note = 2'-fluoroadenosine
  modified_base 11: mod_base = OTHER; note = 2'-fluoroguanosine
  modified_base 12: mod_base = um
  modified_base 13: mod_base = cm
  modified_base 14: mod_base = um
  modified_base 15: mod_base = cm
  modified_base 16: mod_base = gm
  modified_base 17: mod_base = um
  modified_base 18: mod_base = um
  modified_base 19: mod_base = gm
  modified_base 20: mod_base = um
  modified_base 21: mod_base = OTHER; note = 2'-O-methyladenosine-phosphorothioate-inverted abasic deoxyribonucleotide
  source 1..21: mol_type = other RNA
aggcaattcagtctcgttgta

SEQ ID NO: 731 - RNA, 21 nt, synthetic construct
  modified_base 1: mod_base = OTHER; note = inverted abasic deoxyribonucleotide-phosphorothioate-2'-O-methylcytidine
  modified_base 2: mod_base = um
  modified_base 3: mod_base = gm
  modified_base 4: mod_base = gm
  modified_base 5: mod_base = OTHER; note = 2'-O-methyladenosine
  modified_base 6: mod_base = gm
  modified_base 7: mod_base = cm
  modified_base 8: mod_base = OTHER; note = 2'-O-methyladenosine
  modified_base 9: mod_base = OTHER; note = 2'-fluoroadenosine
  modified_base 10: mod_base = OTHER; note = 2'-fluoroguanosine
  modified_base 11: mod_base = OTHER; note = 2'-fluorouridine
  modified_base 12: mod_base = um
  modified_base 13: mod_base = gm
  modified_base 14: mod_base = OTHER; note = 2'-O-methyladenosine
  modified_base 15: mod_base = OTHER; note = 2'-O-methyladenosine
  modified_base 16: mod_base = um
  modified_base 17: mod_base = gm
  modified_base 18: mod_base = OTHER; note = 2'-O-methyladenosine
  modified_base 19: mod_base = um
  modified_base 20: mod_base = cm
  modified_base 21: mod_base = OTHER; note = 2'-O-methyluridine-phosphorothioate-inverted abasic deoxyribonucleotide
  source 1..21: mol_type = other RNA
ctggagcaagttgaatgatct

SEQ ID NO: 732 - RNA, 21 nt, synthetic construct
  modified_base 1: mod_base = OTHER; note = 2'-O-methyladenosine
  modified_base 2: mod_base = gm
  modified_base 3: mod_base = gm
  modified_base 4: mod_base = cm
  modified_base 5: mod_base = OTHER; note = 2'-O-methyladenosine
  modified_base 6: mod_base = OTHER; note = 2'-O-methyladenosine
  modified_base 7: mod_base = um
  modified_base 8: mod_base = um
  modified_base 9: mod_base = OTHER; note = 2'-fluorocytidine
  modified_base 10: mod_base = OTHER; note = 2'-fluoroadenosine
  modified_base 11: mod_base = OTHER; note = 2'-fluoroguanosine
  modified_base 12: mod_base = um
  modified_base 13: mod_base = cm
  modified_base 14: mod_base = um
  modified_base 15: mod_base = cm
  modified_base 16: mod_base = gm
  modified_base 17: mod_base = um
  modified_base 18: mod_base = um
  modified_base 19: mod_base = gm
  modified_base 20: mod_base = um
  modified_base 21: mod_base = OTHER; note = 2'-O-methyladenosine-phosphorothioate-inverted abasic deoxyribonucleotide
  source 1..21: mol_type = other RNA
aggcaattcagtctcgttgta

SEQ ID NO: 733 - RNA, 21 nt, synthetic construct
  modified_base 1: mod_base = OTHER; note = inverted abasic deoxyribonucleotide-phosphorothioate-2'-O-methyladenosine
  modified_base 2: mod_base = OTHER; note = 2'-O-methyladenosine
  modified_base 3: mod_base = OTHER; note = 2'-O-methyladenosine
  modified_base 4: mod_base = cm
  modified_base 5: mod_base = OTHER; note = 2'-O-methyladenosine
  modified_base 6: mod_base = gm
  modified_base 7: mod_base = OTHER; note = 2'-O-methyladenosine
  modified_base 8: mod_base = um
  modified_base 9: mod_base = OTHER; note = 2'-fluorocytidine
  modified_base 10: mod_base = OTHER; note = 2'-fluoroadenosine
  modified_base 11: mod_base = OTHER; note = 2'-fluorouridine
  modified_base 12: mod_base = um
  modified_base 13: mod_base = gm
  modified_base 14: mod_base = gm
  modified_base 15: mod_base = OTHER; note = 2'-O-methyladenosine
  modified_base 16: mod_base = OTHER; note = 2'-O-methyladenosine
  modified_base 17: mod_base = um
  modified_base 18: mod_base = um
  modified_base 19: mod_base = cm
  modified_base 20: mod_base = cm
  modified_base 21: mod_base = OTHER; note = 2'-O-methyluridine-phosphorothioate-inverted abasic deoxyribonucleotide
  source 1..21: mol_type = other RNA
aaacagatcattggaattcct

SEQ ID NO: 734 - RNA, 21 nt, synthetic construct
  modified_base 1: mod_base = OTHER; note = inverted abasic deoxyribonucleotide-phosphorothioate-2'-O-methyluridine
  modified_base 2: mod_base = gm
  modified_base 3: mod_base = um
  modified_base 4: mod_base = gm
  modified_base 5: mod_base = OTHER; note = 2'-O-methyladenosine
  modified_base 6: mod_base = um
  modified_base 7: mod_base = um
  modified_base 8: mod_base = OTHER; note = 2'-O-methyladenosine
  modified_base 9: mod_base = OTHER; note = 2'-fluorouridine
  modified_base 10: mod_base = OTHER; note = 2'-fluoroguanosine
  modified_base 11: mod_base = OTHER; note = 2'-fluorouridine
  modified_base 12: mod_base = cm
  modified_base 13: mod_base = um
  modified_base 14: mod_base = gm
  modified_base 15: mod_base = um
  modified_base 16: mod_base = cm
  modified_base 17: mod_base = OTHER; note = 2'-O-methyladenosine
  modified_base 18: mod_base = gm
  modified_base 19: mod_base = OTHER; note = 2'-O-methyladenosine
  modified_base 20: mod_base = OTHER; note = 2'-O-methyladenosine
  modified_base 21: mod_base = OTHER; note = 2'-O-methyladenosine-phosphorothioate-inverted abasic deoxyribonucleotide
  source 1..21: mol_type = other RNA
tgtgattatgtctgtcagaaa

SEQ ID NO: 735 - RNA, 21 nt, synthetic construct
  modified_base 1: mod_base = OTHER; note = inverted abasic deoxyribonucleotide-phosphorothioate-2'-O-methyluridine
  modified_base 2: mod_base = gm
  modified_base 3: mod_base = um
  modified_base 4: mod_base = gm
  modified_base 5: mod_base = OTHER; note = 2'-O-methyladenosine
  modified_base 6: mod_base = um
  modified_base 7: mod_base = um
  modified_base 8: mod_base = OTHER; note = 2'-O-methyladenosine
  modified_base 9: mod_base = OTHER; note = 2'-fluorouridine
  modified_base 10: mod_base = OTHER; note = 2'-fluoroguanosine
  modified_base 11: mod_base = OTHER; note = 2'-fluorouridine
  modified_base 12: mod_base = cm
  modified_base 13: mod_base = um
  modified_base 14: mod_base = gm
  modified_base 15: mod_base = um
  modified_base 16: mod_base = cm
  modified_base 17: mod_base = OTHER; note = 2'-O-methyladenosine
  modified_base 18: mod_base = gm
  modified_base 19: mod_base = OTHER; note = 2'-O-methyladenosine
  modified_base 20: mod_base = OTHER; note = 2'-O-methyladenosine
  modified_base 21: mod_base = OTHER; note = 2'-O-methyladenosine-phosphorothioate-inverted abasic deoxyribonucleotide
  source 1..21: mol_type = other RNA
tgtgattatgtctgtcagaaa

SEQ ID NO: 736 - RNA, 21 nt, synthetic construct
  modified_base 1: mod_base = OTHER; note = inverted abasic deoxyribonucleotide-phosphorothioate-2'-O-methyladenosine
  modified_base 2: mod_base = OTHER; note = 2'-O-methyladenosine
  modified_base 3: mod_base = OTHER; note = 2'-O-methyladenosine
  modified_base 4: mod_base = cm
  modified_base 5: mod_base = OTHER; note = 2'-O-methyladenosine
  modified_base 6: mod_base = gm
  modified_base 7: mod_base = OTHER; note = 2'-O-methyladenosine
  modified_base 8: mod_base = um
  modified_base 9: mod_base = OTHER; note = 2'-fluorocytidine
  modified_base 10: mod_base = OTHER; note = 2'-fluoroadenosine
  modified_base 11: mod_base = OTHER; note = 2'-fluorouridine
  modified_base 12: mod_base = um
  modified_base 13: mod_base = gm
  modified_base 14: mod_base = gm
  modified_base 15: mod_base = OTHER; note = 2'-O-methyladenosine
  modified_base 16: mod_base = OTHER; note = 2'-O-methyladenosine
  modified_base 17: mod_base = um
  modified_base 18: mod_base = um
  modified_base 19: mod_base = cm
  modified_base 20: mod_base = cm
  modified_base 21: mod_base = OTHER; note = 2'-O-methyluridine-phosphorothioate-inverted abasic deoxyribonucleotide
  source 1..21: mol_type = other RNA
aaacagatcattggaattcct

SEQ ID NO: 737 - RNA, 21 nt, synthetic construct
  modified_base 1: mod_base = OTHER; note = inverted abasic deoxyribonucleotide-phosphorothioate-2'-O-methylcytidine
  modified_base 2: mod_base = gm
  modified_base 3: mod_base = cm
  modified_base 4: mod_base = um
  modified_base 5: mod_base = cm
  modified_base 6: mod_base = OTHER; note = 2'-O-methyladenosine
  modified_base 7: mod_base = gm
  modified_base 8: mod_base = gm
  modified_base 9: mod_base = OTHER; note = 2'-fluorouridine
  modified_base 10: mod_base = OTHER; note = 2'-fluorouridine
  modified_base 11: mod_base = OTHER; note = 2'-fluorocytidine
  modified_base 12: mod_base = um
  modified_base 13: mod_base = gm
  modified_base 14: mod_base = cm
  modified_base 15: mod_base = um
  modified_base 16: mod_base = um
  modified_base 17: mod_base = um
  modified_base 18: mod_base = um
  modified_base 19: mod_base = OTHER; note = 2'-O-methyladenosine
  modified_base 20: mod_base = cm
  modified_base 21: mod_base = OTHER; note = 2'-O-methyladenosine-phosphorothioate-inverted abasic deoxyribonucleotide
  source 1..21: mol_type = other RNA
cgctcaggttctgcttttaca

SEQ ID NO: 738 - RNA, 21 nt, synthetic construct
  modified_base 1: mod_base = OTHER; note = inverted abasic deoxyribonucleotide-phosphorothioate-2'-O-methylguanosine
  modified_base 2: mod_base = OTHER; note = 2'-O-methyladenosine
  modified_base 3: mod_base = cm
  modified_base 4: mod_base = cm
  modified_base 5: mod_base = cm
  modified_base 6: mod_base = um
  modified_base 7: mod_base = gm
  modified_base 8: mod_base = gm
  modified_base 9: mod_base = OTHER; note = 2'-fluoroadenosine
  modified_base 10: mod_base = OTHER; note = 2'-fluoroadenosine
  modified_base 11: mod_base = OTHER; note = 2'-fluoroadenosine
  modified_base 12: mod_base = OTHER; note = 2'-O-methyladenosine
  modified_base 13: mod_base = gm
  modified_base 14: mod_base = cm
  modified_base 15: mod_base = um
  modified_base 16: mod_base = gm
  modified_base 17: mod_base = OTHER; note = 2'-O-methyladenosine
  modified_base 18: mod_base = um
  modified_base 19: mod_base = gm
  modified_base 20: mod_base = OTHER; note = 2'-O-methyladenosine
  modified_base 21: mod_base = OTHER; note = 2'-O-methyladenosine-phosphorothioate-inverted abasic deoxyribonucleotide
  source 1..21: mol_type = other RNA
gaccctggaaaagctgatgaa

SEQ ID NO: 739 - RNA, 21 nt, synthetic construct
  modified_base 1: mod_base = OTHER; note = inverted abasic deoxyribonucleotide-phosphorothioate-2'-O-methyluridine
  modified_base 2: mod_base = gm
  modified_base 3: mod_base = gm
  modified_base 4: mod_base = OTHER; note = 2'-O-methyladenosine
  modified_base 5: mod_base = OTHER; note = 2'-O-methyladenosine
  modified_base 6: mod_base = OTHER; note = 2'-O-methyladenosine
  modified_base 7: mod_base = OTHER; note = 2'-O-methyladenosine
  modified_base 8: mod_base = gm
  modified_base 9: mod_base = OTHER; note = 2'-fluorocytidine
  modified_base 10: mod_base = OTHER; note = 2'-fluorouridine
  modified_base 11: mod_base = OTHER; note = 2'-fluoroguanosine
  modified_base 12: mod_base = OTHER; note = 2'-O-methyladenosine
  modified_base 13: mod_base = um
  modified_base 14: mod_base = gm
  modified_base 15: mod_base = OTHER; note = 2'-O-methyladenosine
  modified_base 16: mod_base = OTHER; note = 2'-O-methyladenosine
  modified_base 17: mod_base = gm
  modified_base 18: mod_base = gm
  modified_base 19: mod_base = cm
  modified_base 20: mod_base = cm
  modified_base 21: mod_base = OTHER; note = 2'-O-methyluridine-phosphorothioate-inverted abasic deoxyribonucleotide
  source 1..21: mol_type = other RNA
tggaaaagctgatgaaggcct

SEQ ID NO: 740 - RNA, 21 nt, synthetic construct
  modified_base 1: mod_base = OTHER; note = inverted abasic deoxyribonucleotide-phosphorothioate-2'-O-methylcytidine
  modified_base 2: mod_base = um
  modified_base 3: mod_base = gm
  modified_base 4: mod_base = OTHER; note = 2'-O-methyladenosine
  modified_base 5: mod_base = um
  modified_base 6: mod_base = gm
  modified_base 7: mod_base = OTHER; note = 2'-O-methyladenosine
  modified_base 8: mod_base = OTHER; note = 2'-O-methyladenosine
  modified_base 9: mod_base = OTHER; note = 2'-fluoroguanosine
  modified_base 10: mod_base = OTHER; note = 2'-fluoroguanosine
  modified_base 11: mod_base = OTHER; note = 2'-fluorocytidine
  modified_base 12: mod_base = cm
  modified_base 13: mod_base = um
  modified_base 14: mod_base = um
  modified_base 15: mod_base = cm
  modified_base 16: mod_base = gm
  modified_base 17: mod_base = OTHER; note = 2'-O-methyladenosine
  modified_base 18: mod_base = gm
  modified_base 19: mod_base = um
  modified_base 20: mod_base = cm
  modified_base 21: mod_base = OTHER; note = 2'-O-methyladenosine-phosphorothioate-inverted abasic deoxyribonucleotide
  source 1..21: mol_type = other RNA
ctgatgaaggccttcgagtca

SEQ ID NO: 741 - RNA, 21 nt, synthetic construct
  modified_base 1: mod_base = OTHER; note = inverted abasic deoxyribonucleotide-phosphorothioate-2'-O-methylguanosine
  modified_base 2: mod_base = gm
  modified_base 3: mod_base = cm
  modified_base 4: mod_base = cm
  modified_base 5: mod_base = um
  modified_base 6: mod_base = um
  modified_base 7: mod_base = cm
  modified_base 8: mod_base = gm
  modified_base 9: mod_base = OTHER; note = 2'-fluoroadenosine
  modified_base 10: mod_base = OTHER; note = 2'-fluoroguanosine
  modified_base 11: mod_base = OTHER; note = 2'-fluorouridine
  modified_base 12: mod_base = cm
  modified_base 13: mod_base = cm
  modified_base 14: mod_base = cm
  modified_base 15: mod_base = um
  modified_base 16: mod_base = cm
  modified_base 17: mod_base = OTHER; note = 2'-O-methyladenosine
  modified_base 18: mod_base = OTHER; note = 2'-O-methyladenosine
  modified_base 19: mod_base = gm
  modified_base 20: mod_base = um
  modified_base 21: mod_base = OTHER; note = 2'-O-methyladenosine-phosphorothioate-inverted abasic deoxyribonucleotide
  source 1..21: mol_type = other RNA
ggccttcgagtccctcaagta

SEQ ID NO: 742 - RNA, 21 nt, synthetic construct
  modified_base 1: mod_base = OTHER; note = inverted abasic deoxyribonucleotide-phosphorothioate-2'-O-methylguanosine
  modified_base 2: mod_base = cm
  modified_base 3: mod_base = cm
  modified_base 4: mod_base = um
  modified_base 5: mod_base = um
  modified_base 6: mod_base = cm
  modified_base 7: mod_base = gm
  modified_base 8: mod_base = OTHER; note = 2'-O-methyladenosine
  modified_base 9: mod_base = OTHER; note = 2'-fluoroguanosine
  modified_base 10: mod_base = OTHER; note = 2'-fluorouridine
  modified_base 11: mod_base = OTHER; note = 2'-fluorocytidine
  modified_base 12: mod_base = cm
  modified_base 13: mod_base = cm
  modified_base 14: mod_base = um
  modified_base 15: mod_base = cm
  modified_base 16: mod_base = OTHER; note = 2'-O-methyladenosine
  modified_base 17: mod_base = OTHER; note = 2'-O-methyladenosine
  modified_base 18: mod_base = gm
  modified_base 19: mod_base = um
  modified_base 20: mod_base = cm
  modified_base 21: mod_base = OTHER; note = 2'-O-methyladenosine-phosphorothioate-inverted abasic deoxyribonucleotide
  source 1..21: mol_type = other RNA
gccttcgagtccctcaagtca

SEQ ID NO: 743 - RNA, 21 nt, synthetic construct
  modified_base 1: mod_base = OTHER; note = inverted abasic deoxyribonucleotide-phosphorothioate-2'-O-methylcytidine
  modified_base 2: mod_base = OTHER; note = 2'-O-methyladenosine
  modified_base 3: mod_base = um
  modified_base 4: mod_base = cm
  modified_base 5: mod_base = gm
  modified_base 6: mod_base = cm
  modified_base 7: mod_base = um
  modified_base 8: mod_base = OTHER; note = 2'-O-methyladenosine
  modified_base 9: mod_base = OTHER; note = 2'-fluorouridine
  modified_base 10: mod_base = OTHER; note = 2'-fluoroguanosine
  modified_base 11: mod_base = OTHER; note = 2'-fluoroguanosine
  modified_base 12: mod_base = OTHER; note = 2'-O-methyladenosine
  modified_base 13: mod_base = OTHER; note = 2'-O-methyladenosine
  modified_base 14: mod_base = cm
  modified_base 15: mod_base = um
  modified_base 16: mod_base = um
  modified_base 17: mod_base = um
  modified_base 18: mod_base = um
  modified_base 19: mod_base = um
  modified_base 20: mod_base = cm
  modified_base 21: mod_base = OTHER; note = 2'-O-methyluridine-phosphorothioate-inverted abasic deoxyribonucleotide
  source 1..21: mol_type = other RNA
catcgctatggaactttttct

SEQ ID NO: 744 - RNA, 21 nt, synthetic construct
  modified_base 1: mod_base = OTHER; note = inverted abasic deoxyribonucleotide-phosphorothioate-2'-O-methylguanosine
  modified_base 2: mod_base = cm
  modified_base 3: mod_base = um
  modified_base 4: mod_base = um
  modified_base 5: mod_base = um
  modified_base 6: mod_base = gm
  modified_base 7: mod_base = OTHER; note = 2'-O-methyladenosine
  modified_base 8: mod_base = um
  modified_base 9: mod_base = OTHER; note = 2'-fluoroguanosine
  modified_base 10: mod_base = OTHER; note = 2'-fluoroguanosine
  modified_base 11: mod_base = OTHER; note = 2'-fluoroadenosine
  modified_base 12: mod_base = um
  modified_base 13: mod_base = um
  modified_base 14: mod_base = cm
  modified_base 15: mod_base = um
  modified_base 16: mod_base = OTHER; note = 2'-O-methyladenosine
  modified_base 17: mod_base = OTHER; note = 2'-O-methyladenosine
  modified_base 18: mod_base = um
  modified_base 19: mod_base = cm
  modified_base 20: mod_base = um
  modified_base 21: mod_base = OTHER; note = 2'-O-methyluridine-phosphorothioate-inverted abasic deoxyribonucleotide
  source 1..21: mol_type = other RNA
gctttgatggattctaatctt

SEQ ID NO: 745 - RNA, 21 nt, synthetic construct
  modified_base 1: mod_base = OTHER; note = inverted abasic deoxyribonucleotide-phosphorothioate-2'-O-methylguanosine
  modified_base 2: mod_base = OTHER; note = 2'-O-methyladenosine
  modified_base 3: mod_base = um
  modified_base 4: mod_base = gm
  modified_base 5: mod_base = gm
  modified_base 6: mod_base = OTHER; note = 2'-O-methyladenosine
  modified_base 7: mod_base = um
  modified_base 8: mod_base = um
  modified_base 9: mod_base = OTHER; note = 2'-fluorocytidine
  modified_base 10: mod_base = OTHER; note = 2'-fluorouridine
  modified_base 11: mod_base = OTHER; note = 2'-fluoroadenosine
  modified_base 12: mod_base = OTHER; note = 2'-O-methyladenosine
  modified_base 13: mod_base = um
  modified_base 14: mod_base = cm
  modified_base 15: mod_base = um
  modified_base 16: mod_base = um
  modified_base 17: mod_base = cm
  modified_base 18: mod_base = cm
  modified_base 19: mod_base = OTHER; note = 2'-O-methyladenosine
  modified_base 20: mod_base = OTHER; note = 2'-O-methyladenosine
  modified_base 21: mod_base = OTHER; note = 2'-O-methyladenosine-phosphorothioate-inverted abasic deoxyribonucleotide
  source 1..21: mol_type = other RNA
gatggattctaatcttccaaa

SEQ ID NO: 746 - RNA, 21 nt, synthetic construct
  modified_base 1: mod_base = OTHER; note = inverted abasic deoxyribonucleotide-phosphorothioate-2'-O-methyluridine
  modified_base 2: mod_base = gm
  modified_base 3: mod_base = gm
  modified_base 4: mod_base = cm
  modified_base 5: mod_base = OTHER; note = 2'-O-methyladenosine
  modified_base 6: mod_base = OTHER; note = 2'-O-methyladenosine
  modified_base 7: mod_base = um
  modified_base 8: mod_base = um
  modified_base 9: mod_base = OTHER; note = 2'-fluorouridine
  modified_base 10: mod_base = OTHER; note = 2'-fluorouridine
  modified_base 11: mod_base = OTHER; note = 2'-fluoroguanosine
  modified_base 12: mod_base = cm
  modified_base 13: mod_base = OTHER; note = 2'-O-methyladenosine
  modified_base 14: mod_base = OTHER; note = 2'-O-methyladenosine
  modified_base 15: mod_base = OTHER; note = 2'-O-methyladenosine
  modified_base 16: mod_base = um
  modified_base 17: mod_base = gm
  modified_base 18: mod_base = OTHER; note = 2'-O-methyladenosine
  modified_base 19: mod_base = cm
  modified_base 20: mod_base = OTHER; note = 2'-O-methyladenosine
  modified_base 21: mod_base = OTHER; note = 2'-O-methyladenosine-phosphorothioate-inverted abasic deoxyribonucleotide
  source 1..21: mol_type = other RNA
tggcaattttgcaaatgacaa

SEQ ID NO: 747 - RNA, 21 nt, synthetic construct
  modified_base 1: mod_base = OTHER; note = inverted abasic deoxyribonucleotide-phosphorothioate-2'-O-methylcytidine
  modified_base 2: mod_base = um
  modified_base 3: mod_base = gm
  modified_base 4: mod_base = OTHER; note = 2'-O-methyladenosine
  modified_base 5: mod_base = cm
  modified_base 6: mod_base = gm
  modified_base 7: mod_base = um
  modified_base 8: mod_base = um
  modified_base 9: mod_base = OTHER; note = 2'-fluoroadenosine
  modified_base 10: mod_base = OTHER; note = 2'-fluorocytidine
  modified_base 11: mod_base = OTHER; note = 2'-fluoroadenosine
  modified_base 12: mod_base = um
  modified_base 13: mod_base = cm
  modified_base 14: mod_base = OTHER; note = 2'-O-methyladenosine
  modified_base 15: mod_base = um
  modified_base 16: mod_base = OTHER; note = 2'-O-methyladenosine
  modified_base 17: mod_base = cm
  modified_base 18: mod_base = OTHER; note = 2'-O-methyladenosine
  modified_base 19: mod_base = cm
  modified_base 20: mod_base = OTHER; note = 2'-O-methyladenosine
  modified_base 21: mod_base = OTHER; note = 2'-O-methyladenosine-phosphorothioate-inverted abasic deoxyribonucleotide
  source 1..21: mol_type = other RNA
ctgacgttacatcatacacaa

SEQ ID NO: 748 - RNA, 21 nt, synthetic construct
  modified_base 1: mod_base = OTHER; note = inverted abasic deoxyribonucleotide-phosphorothioate-2'-O-methylguanosine
  modified_base 2: mod_base = cm
  modified_base 3: mod_base = OTHER; note = 2'-O-methyladenosine
  modified_base 4: mod_base = cm
  modified_base 5: mod_base = cm
  modified_base 6: mod_base = OTHER; note = 2'-O-methyladenosine
  modified_base 7: mod_base = OTHER; note = 2'-O-methyladenosine
  modified_base 8: mod_base = gm
  modified_base 9: mod_base = OTHER; note = 2'-fluoroadenosine
  modified_base 10: mod_base = OTHER; note = 2'-fluorocytidine
  modified_base 11: mod_base = OTHER; note = 2'-fluorocytidine
  modified_base 12: mod_base = OTHER; note = 2'-O-methyladenosine
  modified_base 13: mod_base = cm
  modified_base 14: mod_base = OTHER; note = 2'-O-methyladenosine
  modified_base 15: mod_base = OTHER; note = 2'-O-methyladenosine
  modified_base 16: mod_base = um
  modified_base 17: mod_base = gm
  modified_base 18: mod_base = um
  modified_base 19: mod_base = um
  modified_base 20: mod_base = gm
  modified_base 21: mod_base = OTHER; note = 2'-O-methyluridine-phosphorothioate-inverted abasic deoxyribonucleotide
  source 1..21: mol_type = other RNA
gcaccaagaccacaatgttgt

SEQ ID NO: 749 - RNA, 21 nt, synthetic construct
  modified_base 1: mod_base = OTHER; note = inverted abasic deoxyribonucleotide-phosphorothioate-2'-O-methylguanosine
  modified_base 2: mod_base = OTHER; note = 2'-O-methyladenosine
  modified_base 3: mod_base = gm
  modified_base 4: mod_base = um
  modified_base 5: mod_base = OTHER; note = 2'-O-methyladenosine
  modified_base 6: mod_base = um
  modified_base 7: mod_base = um
  modified_base 8: mod_base = gm
  modified_base 9: mod_base = OTHER; note = 2'-fluorouridine
  modified_base 10: mod_base = OTHER; note = 2'-fluoroguanosine
  modified_base 11: mod_base = OTHER; note = 2'-fluoroguanosine
  modified_base 12: mod_base = OTHER; note = 2'-O-methyladenosine
  modified_base 13: mod_base = OTHER; note = 2'-O-methyladenosine
  modified_base 14: mod_base = cm
  modified_base 15: mod_base = um
  modified_base 16: mod_base = um
  modified_base 17: mod_base = OTHER; note = 2'-O-methyladenosine
  modified_base 18: mod_base = um
  modified_base 19: mod_base = OTHER; note = 2'-O-methyladenosine
  modified_base 20: mod_base = gm
  modified_base 21: mod_base = OTHER; note = 2'-O-methyladenosine-phosphorothioate-inverted abasic deoxyribonucleotide
  source 1..21: mol_type = other RNA
gagtattgtggaacttataga

SEQ ID NO: 750 - RNA, 21 nt, synthetic construct
  modified_base 1: mod_base = OTHER; note = inverted abasic deoxyribonucleotide-phosphorothioate-2'-O-methylcytidine
  modified_base 2: mod_base = um
  modified_base 3: mod_base = um
  modified_base 4: mod_base = gm
  modified_base 5: mod_base = OTHER; note = 2'-O-methyladenosine
  modified_base 6: mod_base = OTHER; note = 2'-O-methyladenosine
  modified_base 7: mod_base = cm
  modified_base 8: mod_base = um
  modified_base 9: mod_base = OTHER; note = 2'-fluoroadenosine
  modified_base 10: mod_base = OTHER; note = 2'-fluorocytidine
  modified_base 11: mod_base = OTHER; note = 2'-fluoroadenosine
  modified_base 12: mod_base = um
  modified_base 13: mod_base = cm
  modified_base 14: mod_base = gm
  modified_base 15: mod_base = OTHER; note = 2'-O-methyladenosine
  modified_base 16: mod_base = um
  modified_base 17: mod_base = cm
  modified_base 18: mod_base = OTHER; note = 2'-O-methyladenosine
  modified_base 19: mod_base = um
  modified_base 20: mod_base = gm
  modified_base 21: mod_base = OTHER; note = 2'-O-methyladenosine-phosphorothioate-inverted abasic deoxyribonucleotide
  source 1..21: mol_type = other RNA
cttgaactacatcgatcatga

SEQ ID NO: 751 - RNA, 21 nt, synthetic construct
  modified_base 1: mod_base = OTHER; note = inverted abasic deoxyribonucleotide-phosphorothioate-2'-O-methyluridine
  modified_base 2: mod_base = gm
  modified_base 3: mod_base = gm
  modified_base 4: mod_base = OTHER; note = 2'-O-methyladenosine
  modified_base 5: mod_base = um
  modified_base 6: mod_base = gm
  modified_base 7: mod_base = cm
  modified_base 8: mod_base = um
  modified_base 9: mod_base = OTHER; note = 2'-fluoroguanosine
  modified_base 10: mod_base = OTHER; note = 2'-fluorouridine
  modified_base 11: mod_base = OTHER; note = 2'-fluoroguanosine
  modified_base 12: mod_base = OTHER; note = 2'-O-methyladenosine
  modified_base 13: mod_base = OTHER; note = 2'-O-methyladenosine
  modified_base 14: mod_base = gm
  modified_base 15: mod_base = cm
  modified_base 16: mod_base = um
  modified_base 17: mod_base = um
  modified_base 18: mod_base = um
  modified_base 19: mod_base = gm
  modified_base 20: mod_base = um
  modified_base 21: mod_base = OTHER; note = 2'-O-methyladenosine-phosphorothioate-inverted abasic deoxyribonucleotide
  source 1..21: mol_type = other RNA
tggatgctgtgaagctttgta

SEQ ID NO: 752 - RNA, 21 nt, synthetic construct
  modified_base 1: mod_base = OTHER; note = inverted abasic deoxyribonucleotide-phosphorothioate-2'-O-methylcytidine
  modified_base 2: mod_base = OTHER; note = 2'-O-methyladenosine
  modified_base 3: mod_base = gm
  modified_base 4: mod_base = gm
  modified_base 5: mod_base = um
  modified_base 6: mod_base = cm
  modified_base 7: mod_base = cm
  modified_base 8: mod_base = um
  modified_base 9: mod_base = OTHER; note = 2'-fluoroguanosine
  modified_base 10: mod_base = OTHER; note = 2'-fluorouridine
  modified_base 11: mod_base = OTHER; note = 2'-fluorouridine
  modified_base 12: mod_base = OTHER; note = 2'-O-methyladenosine
  modified_base 13: mod_base = cm
  modified_base 14: mod_base = OTHER; note = 2'-O-methyladenosine
  modified_base 15: mod_base = OTHER; note = 2'-O-methyladenosine
  modified_base 16: mod_base = cm
  modified_base 17: mod_base = OTHER; note = 2'-O-methyladenosine
  modified_base 18: mod_base = OTHER; note = 2'-O-methyladenosine
  modified_base 19: mod_base = gm
  modified_base 20: mod_base = um
  modified_base 21: mod_base = OTHER; note = 2'-O-methyladenosine-phosphorothioate-inverted abasic deoxyribonucleotide
  source 1..21: mol_type = other RNA
caggtcctgttacaacaagta

SEQ ID NO: 753 - RNA, 21 nt, synthetic construct
  modified_base 1: mod_base = OTHER; note = inverted abasic deoxyribonucleotide-phosphorothioate-2'-O-methylcytidine
  modified_base 2: mod_base = OTHER; note = 2'-O-methyladenosine
  modified_base 3: mod_base = OTHER; note = 2'-O-methyladenosine
  modified_base 4: mod_base = cm
  modified_base 5: mod_base = OTHER; note = 2'-O-methyladenosine
  modified_base 6: mod_base = OTHER; note = 2'-O-methyladenosine
  modified_base 7: mod_base = gm
  modified_base 8: mod_base = um
  modified_base 9: mod_base = OTHER; note = 2'-fluoroadenosine
  modified_base 10: mod_base = OTHER; note = 2'-fluoroadenosine
  modified_base 11: mod_base = OTHER; note = 2'-fluoroadenosine
  modified_base 12: mod_base = um
  modified_base 13: mod_base = cm
  modified_base 14: mod_base = cm
  modified_base 15: mod_base = um
  modified_base 16: mod_base = cm
  modified_base 17: mod_base = OTHER; note = 2'-O-methyladenosine
  modified_base 18: mod_base = um
  modified_base 19: mod_base = cm
  modified_base 20: mod_base = OTHER; note = 2'-O-methyladenosine
  modified_base 21: mod_base = OTHER; note = 2'-O-methyladenosine-phosphorothioate-inverted abasic deoxyribonucleotide
  source 1..21: mol_type = other RNA
caacaagtaaatcctcatcaa

SEQ ID NO: 754 - RNA, 21 nt, synthetic construct
  modified_base 1: mod_base = OTHER; note = inverted abasic deoxyribonucleotide-phosphorothioate-2'-O-methylcytidine
  modified_base 2: mod_base = cm
  modified_base 3: mod_base = OTHER; note = 2'-O-methyladenosine
  modified_base 4: mod_base = OTHER; note = 2'-O-methyladenosine
  modified_base 5: mod_base = um
  modified_base 6: mod_base = gm
  modified_base 7: mod_base = OTHER; note = 2'-O-methyladenosine
  modified_base 8: mod_base = um
  modified_base 9: mod_base = OTHER; note = 2'-fluoroguanosine
  modified_base 10: mod_base = OTHER; note = 2'-fluoroguanosine
  modified_base 11: mod_base = OTHER; note = 2'-fluorocytidine
  modified_base 12: mod_base = OTHER; note = 2'-O-methyladenosine
  modified_base 13: mod_base = OTHER; note = 2'-O-methyladenosine
  modified_base 14: mod_base = cm
  modified_base 15: mod_base = um
  modified_base 16: mod_base = gm
  modified_base 17: mod_base = um
  modified_base 18: mod_base = um
  modified_base 19: mod_base = um
  modified_base 20: mod_base = gm
  modified_base 21: mod_base = OTHER; note = 2'-O-methyluridine-phosphorothioate-inverted abasic deoxyribonucleotide
  source 1..21: mol_type = other RNA
ccaatgatggcaactgtttgt

SEQ ID NO: 755 - RNA, 21 nt, synthetic construct
  modified_base 1: mod_base = OTHER; note = inverted abasic deoxyribonucleotide-phosphorothioate-2'-O-methylcytidine
  modified_base 2: mod_base = OTHER; note = 2'-O-methyladenosine
  modified_base 3: mod_base = gm
  modified_base 4: mod_base = gm
  modified_base 5: mod_base = um
  modified_base 6: mod_base = gm
  modified_base 7: mod_base = um
  modified_base 8: mod_base = um
  modified_base 9: mod_base = OTHER; note = 2'-fluorouridine
  modified_base 10: mod_base = OTHER; note = 2'-fluoroadenosine
  modified_base 11: mod_base = OTHER; note = 2'-fluorouridine
  modified_base 12: mod_base = um
  modified_base 13: mod_base = gm
  modified_base 14: mod_base = gm
  modified_base 15: mod_base = cm
  modified_base 16: mod_base = um
  modified_base 17: mod_base = um
  modified_base 18: mod_base = um
  modified_base 19: mod_base = gm
  modified_base 20: mod_base = um
  modified_base 21: mod_base = OTHER; note = 2'-O-methyladenosine-phosphorothioate-inverted abasic deoxyribonucleotide
  source 1..21: mol_type = other RNA
caggtgtttattggctttgta

SEQ ID NO: 756 - RNA, 21 nt, synthetic construct
  modified_base 1: mod_base = OTHER; note = inverted abasic deoxyribonucleotide-phosphorothioate-2'-O-methyladenosine
  modified_base 2: mod_base = OTHER; note = 2'-O-methyladenosine
  modified_base 3: mod_base = gm
  modified_base 4: mod_base = cm
  modified_base 5: mod_base = gm
  modified_base 6: mod_base = OTHER; note = 2'-O-methyladenosine
  modified_base 7: mod_base = cm
  modified_base 8: mod_base = um
  modified_base 9: mod_base = OTHER; note = 2'-fluoroguanosine
  modified_base 10: mod_base = OTHER; note = 2'-fluorouridine
  modified_base 11: mod_base = OTHER; note = 2'-fluorocytidine
  modified_base 12: mod_base = um
  modified_base 13: mod_base = cm
  modified_base 14: mod_base = gm
  modified_base 15: mod_base = OTHER; note = 2'-O-methyladenosine
  modified_base 16: mod_base = cm
  modified_base 17: mod_base = OTHER; note = 2'-O-methyladenosine
  modified_base 18: mod_base = gm
  modified_base 19: mod_base = OTHER; note = 2'-O-methyladenosine
  modified_base 20: mod_base = um
  modified_base 21: mod_base = OTHER; note = 2'-O-methyladenosine-phosphorothioate-inverted abasic deoxyribonucleotide
  source 1..21: mol_type = other RNA
aagcgactgtctcgacagata

SEQ ID NO: 757 - RNA, 21 nt, synthetic construct
  modified_base 1: mod_base = OTHER; note = inverted abasic deoxyribonucleotide-phosphorothioate-2'-O-methyluridine
  modified_base 2: mod_base = cm
  modified_base 3: mod_base = cm
  modified_base 4: mod_base = gm
  modified_base 5: mod_base = um
  modified_base 6: mod_base = gm
  modified_base 7: mod_base = OTHER; note = 2'-O-methyladenosine
  modified_base 8: mod_base = gm
  modified_base 9: mod_base = OTHER; note = 2'-fluorocytidine
  modified_base 10: mod_base = OTHER; note = 2'-fluoroadenosine
  modified_base 11: mod_base = OTHER; note = 2'-fluorocytidine
  modified_base 12: mod_base = um
  modified_base 13: mod_base = gm
  modified_base 14: mod_base = um
  modified_base 15: mod_base = um
  modified_base 16: mod_base = cm
  modified_base 17: mod_base = OTHER; note = 2'-O-methyladenosine
  modified_base 18: mod_base = OTHER; note = 2'-O-methyladenosine
  modified_base 19: mod_base = cm
  modified_base 20: mod_base = um
  modified_base 21: mod_base = OTHER; note = 2'-O-methyladenosine-phosphorothioate-inverted abasic deoxyribonucleotide
  source 1..21: mol_type = other RNA
tccgtgagcactgttcaacta

SEQ ID NO: 758 - RNA, 21 nt, synthetic construct
  modified_base 1: mod_base = OTHER; note = inverted abasic deoxyribonucleotide-phosphorothioate-2'-O-methylcytidine
  modified_base 2: mod_base = cm
  modified_base 3: mod_base = OTHER; note = 2'-O-methyladenosine
  modified_base 4: mod_base = gm
  modified_base 5: mod_base = cm
  modified_base 6: mod_base = OTHER; note = 2'-O-methyladenosine
  modified_base 7: mod_base = cm
  modified_base 8: mod_base = OTHER; note = 2'-O-methyladenosine
  modified_base 9: mod_base = OTHER; note = 2'-fluoroadenosine
  modified_base 10: mod_base = OTHER; note = 2'-fluoroadenosine
  modified_base 11: mod_base = OTHER; note = 2'-fluoroguanosine
  modified_base 12: mod_base = um
  modified_base 13: mod_base = um
  modified_base 14: mod_base = OTHER; note = 2'-O-methyladenosine
  modified_base 15: mod_base = cm
  modified_base 16: mod_base = um
  modified_base 17: mod_base = um
  modified_base 18: mod_base = OTHER; note = 2'-O-methyladenosine
  modified_base 19: mod_base = gm
  modified_base 20: mod_base = um
  modified_base 21: mod_base = OTHER; note = 2'-O-methyladenosine-phosphorothioate-inverted abasic deoxyribonucleotide
  source 1..21: mol_type = other RNA
ccagcacaaagttacttagta

SEQ ID NO: 759 - RNA, 21 nt, synthetic construct
  modified_base 1: mod_base = OTHER; note = inverted abasic deoxyribonucleotide-phosphorothioate-2'-O-methylguanosine
  modified_base 2: mod_base = cm
  modified_base 3: mod_base = OTHER; note = 2'-O-methyladenosine
  modified_base 4: mod_base = gm
  modified_base 5: mod_base = cm
  modified_base 6: mod_base = cm
  modified_base 7: mod_base = OTHER; note = 2'-O-methyladenosine
  modified_base 8: mod_base = OTHER; note = 2'-O-methyladenosine
  modified_base 9: mod_base = OTHER; note = 2'-fluoroadenosine
  modified_base 10: mod_base = OTHER; note = 2'-fluorocytidine
  modified_base 11: mod_base = OTHER; note = 2'-fluorouridine
  modified_base 12: mod_base = um
  modified_base 13: mod_base = gm
  modified_base 14: mod_base = gm
  modified_base 15: mod_base = OTHER; note = 2'-O-methyladenosine
  modified_base 16: mod_base = OTHER; note = 2'-O-methyladenosine
  modified_base 17: mod_base = um
  modified_base 18: mod_base = gm
  modified_base 19: mod_base = um
  modified_base 20: mod_base = gm
  modified_base 21: mod_base = OTHER; note = 2'-O-methyladenosine-phosphorothioate-inverted abasic deoxyribonucleotide
  source 1..21: mol_type = other RNA
gcagccaaacttggaatgtga

SEQ ID NO: 760 - RNA, 21 nt, synthetic construct
  modified_base 1: mod_base = OTHER; note = inverted abasic deoxyribonucleotide-phosphorothioate-2'-O-methylguanosine
  modified_base 2: mod_base = um
  modified_base 3: mod_base = gm
  modified_base 4: mod_base = cm
  modified_base 5: mod_base = OTHER; note = 2'-O-methyladenosine
  modified_base 6: mod_base = OTHER; note = 2'-O-methyladenosine
  modified_base 7: mod_base = um
  modified_base 8: mod_base = OTHER; note = 2'-O-methyladenosine
  modified_base 9: mod_base = OTHER; note = 2'-fluoroguanosine
  modified_base 10: mod_base = OTHER; note = 2'-fluoroadenosine
  modified_base 11: mod_base = OTHER; note = 2'-fluoroguanosine
  modified_base 12: mod_base = OTHER; note = 2'-O-methyladenosine
  modified_base 13: mod_base = OTHER; note = 2'-O-methyladenosine
  modified_base 14: mod_base = OTHER; note = 2'-O-methyladenosine
  modified_base 15: mod_base = um
  modified_base 16: mod_base = OTHER; note = 2'-O-methyladenosine
  modified_base 17: mod_base = gm
  modified_base 18: mod_base = um
  modified_base 19: mod_base = OTHER; note = 2'-O-methyladenosine
  modified_base 20: mod_base = cm
  modified_base 21: mod_base = OTHER; note = 2'-O-methyladenosine-phosphorothioate-inverted abasic deoxyribonucleotide
  source 1..21: mol_type = other RNA
gtgcaatagagaaatagtaca

SEQ ID NO: 761 - RNA, 21 nt, synthetic construct
  modified_base 1: mod_base = OTHER; note = inverted abasic deoxyribonucleotide-phosphorothioate-2'-O-methylcytidine
  modified_base 2: mod_base = um
  modified_base 3: mod_base = gm
  modified_base 4: mod_base = um
  modified_base 5: mod_base = cm
  modified_base 6: mod_base = OTHER; note = 2'-O-methyladenosine
  modified_base 7: mod_base = gm
  modified_base 8: mod_base = OTHER; note = 2'-O-methyladenosine
  modified_base 9: mod_base = OTHER; note = 2'-fluoroadenosine
  modified_base 10: mod_base = OTHER; note = 2'-fluorocytidine
  modified_base 11: mod_base = OTHER; note = 2'-fluorocytidine
  modified_base 12: mod_base = um
  modified_base 13: mod_base = cm
  modified_base 14: mod_base = cm
  modified_base 15: mod_base = OTHER; note = 2'-O-methyladenosine
  modified_base 16: mod_base = um
  modified_base 17: mod_base = gm
  modified_base 18: mod_base = OTHER; note = 2'-O-methyladenosine
  modified_base 19: mod_base = cm
  modified_base 20: mod_base = um
  modified_base 21: mod_base = OTHER; note = 2'-O-methyladenosine-phosphorothioate-inverted abasic deoxyribonucleotide
  source 1..21: mol_type = other RNA
ctgtcagaacctccatgacta

SEQ ID NO: 762 - RNA, 21 nt, synthetic construct
  modified_base 1: mod_base = OTHER; note = inverted abasic deoxyribonucleotide-phosphorothioate-2'-O-methylguanosine
  modified_base 2: mod_base = cm
  modified_base 3: mod_base = um
  modified_base 4: mod_base = cm
  modified_base 5: mod_base = OTHER; note = 2'-O-methyladenosine
  modified_base 6: mod_base = um
  modified_base 7: mod_base = um
  modified_base 8: mod_base = gm
  modified_base 9: mod_base = OTHER; note = 2'-fluorouridine
  modified_base 10: mod_base = OTHER; note = 2'-fluoroadenosine
  modified_base 11: mod_base = OTHER; note = 2'-fluoroadenosine
  modified_base 12: mod_base = OTHER; note = 2'-O-methyladenosine
  modified_base 13: mod_base = um
  modified_base 14: mod_base = cm
  modified_base 15: mod_base = OTHER; note = 2'-O-methyladenosine
  modified_base 16: mod_base = cm
  modified_base 17: mod_base = OTHER; note = 2'-O-methyladenosine
  modified_base 18: mod_base = um
  modified_base 19: mod_base = um
  modified_base 20: mod_base = cm
  modified_base 21: mod_base = OTHER; note = 2'-O-methyladenosine-phosphorothioate-inverted abasic deoxyribonucleotide
  source 1..21: mol_type = other RNA
gctcattgtaaatcacattca

SEQ ID NO: 763 - RNA, 21 nt, synthetic construct
  modified_base 1: mod_base = OTHER; note = inverted abasic deoxyribonucleotide-phosphorothioate-2'-O-methylcytidine
  modified_base 2: mod_base = OTHER; note = 2'-O-methyladenosine
  modified_base 3: mod_base = gm
  modified_base 4: mod_base = um
  modified_base 5: mod_base = OTHER; note = 2'-O-methyladenosine
  modified_base 6: mod_base = cm
  modified_base 7: mod_base = OTHER; note = 2'-O-methyladenosine
  modified_base 8: mod_base = gm
  modified_base 9: mod_base = OTHER; note = 2'-fluoroguanosine
  modified_base 10: mod_base = OTHER; note = 2'-fluoroadenosine
  modified_base 11: mod_base = OTHER; note = 2'-fluorocytidine
  modified_base 12: mod_base = um
  modified_base 13: mod_base = um
  modified_base 14: mod_base = cm
  modified_base 15: mod_base = OTHER; note = 2'-O-methyladenosine
  modified_base 16: mod_base = um
  modified_base 17: mod_base = cm
  modified_base 18: mod_base = OTHER; note = 2'-O-methyladenosine
  modified_base 19: mod_base = gm
  modified_base 20: mod_base = um
  modified_base 21: mod_base = OTHER; note = 2'-O-methyladenosine-phosphorothioate-inverted abasic deoxyribonucleotide
  source 1..21: mol_type = other RNA
cagtacaggacttcatcagta

SEQ ID NO: 764 - RNA, 21 nt, synthetic construct
  modified_base 1: mod_base = OTHER; note = inverted abasic deoxyribonucleotide-phosphorothioate-2'-O-methyladenosine
  modified_base 2: mod_base = gm
  modified_base 3: mod_base = gm
  modified_base 4: mod_base = cm
  modified_base 5: mod_base = OTHER; note = 2'-O-methyladenosine
  modified_base 6: mod_base = OTHER; note = 2'-O-methyladenosine
  modified_base 7: mod_base = um
  modified_base 8: mod_base = um
  modified_base 9: mod_base = OTHER; note = 2'-fluorocytidine
  modified_base 10: mod_base = OTHER; note = 2'-fluoroadenosine
  modified_base 11: mod_base = OTHER; note = 2'-fluoroguanosine
  modified_base 12: mod_base = um
  modified_base 13: mod_base = cm
  modified_base 14: mod_base = um
  modified_base 15: mod_base = cm
  modified_base 16: mod_base = gm
  modified_base 17: mod_base = um
  modified_base 18: mod_base = um
  modified_base 19: mod_base = gm
  modified_base 20: mod_base = um
  modified_base 21: mod_base = OTHER; note = 2'-O-methyladenosine-phosphorothioate-inverted abasic deoxyribonucleotide
  source 1..21: mol_type = other RNA
aggcaattcagtctcgttgta

SEQ ID NO: 765 - RNA, 21 nt, synthetic construct
  modified_base 1: mod_base = OTHER; note = inverted abasic deoxyribonucleotide-phosphorothioate-2'-O-methylguanosine
  modified_base 2: mod_base = um
  modified_base 3: mod_base = um
  modified_base 4: mod_base = gm
  modified_base 5: mod_base = cm
  modified_base 6: mod_base = cm
  modified_base 7: mod_base = OTHER; note = 2'-O-methyladenosine
  modified_base 8: mod_base = OTHER; note = 2'-O-methyladenosine
  modified_base 9: mod_base = OTHER; note = 2'-fluorouridine
  modified_base 10: mod_base = OTHER; note = 2'-fluoroguanosine
  modified_base 11: mod_base = OTHER; note = 2'-fluoroguanosine
  modified_base 12: mod_base = OTHER; note = 2'-O-methyladenosine
  modified_base 13: mod_base = OTHER; note = 2'-O-methyladenosine
  modified_base 14: mod_base = gm
  modified_base 15: mod_base = OTHER; note = 2'-O-methyladenosine
  modified_base 16: mod_base = OTHER; note = 2'-O-methyladenosine
  modified_base 17: mod_base = cm
  modified_base 18: mod_base = um
  modified_base 19: mod_base = cm
  modified_base 20: mod_base = OTHER; note = 2'-O-methyladenosine
  modified_base 21: mod_base = OTHER; note = 2'-O-methyladenosine-phosphorothioate-inverted abasic deoxyribonucleotide
  source 1..21: mol_type = other RNA
gttgccaatggaagaactcaa

SEQ ID NO: 766 - RNA, 21 nt, synthetic construct
  modified_base 1: mod_base = OTHER; note = inverted abasic deoxyribonucleotide-phosphorothioate-2'-O-methylcytidine
  modified_base 2: mod_base = cm
  modified_base 3: mod_base = OTHER; note = 2'-O-methyladenosine
  modified_base 4: mod_base = um
  modified_base 5: mod_base = gm
  modified_base 6: mod_base = cm
  modified_base 7: mod_base = OTHER; note = 2'-O-methyladenosine
  modified_base 8: mod_base = OTHER; note = 2'-O-methyladenosine
  modified_base 9: mod_base = OTHER; note = 2'-fluoroguanosine
  modified_base 10: mod_base = OTHER; note = 2'-fluoroadenosine
  modified_base 11: mod_base = OTHER; note = 2'-fluorocytidine
  modified_base 12: mod_base = um
  modified_base 13: mod_base = cm
  modified_base 14: mod_base = OTHER; note = 2'-O-methyladenosine
  modified_base 15: mod_base = cm
  modified_base 16: mod_base = um
  modified_base 17: mod_base = um
  modified_base 18: mod_base = OTHER; note = 2'-O-methyladenosine
  modified_base 19: mod_base = gm
  modified_base 20: mod_base = um
  modified_base 21: mod_base = OTHER; note = 2'-O-methyladenosine-phosphorothioate-inverted abasic deoxyribonucleotide
  source 1..21: mol_type = other RNA
ccatgcaagactcacttagta

SEQ ID NO: 767 - RNA, 21 nt, synthetic construct
  modified_base 1: mod_base = OTHER; note = inverted abasic deoxyribonucleotide-phosphorothioate-2'-O-methyladenosine
  modified_base 2: mod_base = gm
  modified_base 3: mod_base = gm
  modified_base 4: mod_base = gm
  modified_base 5: mod_base = OTHER; note = 2'-O-methyladenosine
  modified_base 6: mod_base = um
  modified_base 7: mod_base = gm
  modified_base 8: mod_base = OTHER; note = 2'-O-methyladenosine
  modified_base 9: mod_base = OTHER; note = 2'-fluoroguanosine
  modified_base 10: mod_base = OTHER; note = 2'-fluorouridine
  modified_base 11: mod_base = OTHER; note = 2'-fluoroguanosine
  modified_base 12: mod_base = OTHER; note = 2'-O-methyladenosine
  modified_base 13: mod_base = OTHER; note = 2'-O-methyladenosine
  modified_base 14: mod_base = OTHER; note = 2'-O-methyladenosine
  modified_base 15: mod_base = um
  modified_base 16: mod_base = um
  modified_base 17: mod_base = um
  modified_base 18: mod_base = cm
  modified_base 19: mod_base = um
  modified_base 20: mod_base = gm
  modified_base 21: mod_base = OTHER; note = 2'-O-methyladenosine-phosphorothioate-inverted abasic deoxyribonucleotide
  source 1..21: mol_type = other RNA
agggatgagtgaaatttctga

SEQ ID NO: 768 - RNA, 21 nt, synthetic construct
  modified_base 1: mod_base = OTHER; note = inverted abasic deoxyribonucleotide-phosphorothioate-2'-O-methylcytidine
  modified_base 2: mod_base = um
  modified_base 3: mod_base = gm
  modified_base 4: mod_base = gm
  modified_base 5: mod_base = OTHER; note = 2'-O-methyladenosine
  modified_base 6: mod_base = gm
  modified_base 7: mod_base = cm
  modified_base 8: mod_base = OTHER; note = 2'-O-methyladenosine
  modified_base 9: mod_base = OTHER; note = 2'-fluoroadenosine
  modified_base 10: mod_base = OTHER; note = 2'-fluoroguanosine
  modified_base 11: mod_base = OTHER; note = 2'-fluorouridine
  modified_base 12: mod_base = um
  modified_base 13: mod_base = gm
  modified_base 14: mod_base = OTHER; note = 2'-O-methyladenosine
  modified_base 15: mod_base = OTHER; note = 2'-O-methyladenosine
  modified_base 16: mod_base = um
  modified_base 17: mod_base = gm
  modified_base 18: mod_base = OTHER; note = 2'-O-methyladenosine
  modified_base 19: mod_base = um
  modified_base 20: mod_base = cm
  modified_base 21: mod_base = OTHER; note = 2'-O-methyluridine-phosphorothioate-inverted abasic deoxyribonucleotide
  source 1..21: mol_type = other RNA
ctggagcaagttgaatgatct

SEQ ID NO: 769 - RNA, 21 nt, synthetic construct
  modified_base 1: mod_base = OTHER; note = inverted abasic deoxyribonucleotide-phosphorothioate-2'-O-methylcytidine
  modified_base 2: mod_base = gm
  modified_base 3: mod_base = OTHER; note = 2'-O-methyladenosine
  modified_base 4: mod_base = cm
  modified_base 5: mod_base = cm
  modified_base 6: mod_base = cm
  modified_base 7: mod_base = um
  modified_base 8: mod_base = gm
  modified_base 9: mod_base = OTHER; note = 2'-fluoroguanosine
  modified_base 10: mod_base = OTHER; note = 2'-fluoroadenosine
  modified_base 11: mod_base = OTHER; note = 2'-fluoroadenosine
  modified_base 12: mod_base = OTHER; note = 2'-O-methyladenosine
  modified_base 13: mod_base = OTHER; note = 2'-O-methyladenosine
  modified_base 14: mod_base = gm
  modified_base 15: mod_base = cm
  modified_base 16: mod_base = um
  modified_base 17: mod_base = OTHER; note = 2'-O-methylinosine
  modified_base 18: mod_base = OTHER; note = 2'-O-methyladenosine
  modified_base 19: mod_base = um
  modified_base 20: mod_base = gm
  modified_base 21: mod_base = OTHER; note = 2'-O-methyladenosine-phosphorothioate-inverted abasic deoxyribonucleotide
  source 1..21: mol_type = other RNA
cgaccctggaaaagctnatga

SEQ ID NO: 770 - RNA, 21 nt, synthetic construct
  modified_base 1: mod_base = OTHER; note = inverted abasic deoxyribonucleotide-phosphorothioate-2'-O-methylguanosine
  modified_base 2: mod_base = cm
  modified_base 3: mod_base = um
  modified_base 4: mod_base = gm
  modified_base 5: mod_base = OTHER; note = 2'-O-methyladenosine
  modified_base 6: mod_base = um
  modified_base 7: mod_base = gm
  modified_base 8: mod_base = OTHER; note = 2'-O-methyladenosine
  modified_base 9: mod_base = OTHER; note = 2'-fluoroadenosine
  modified_base 10: mod_base = OTHER; note = 2'-fluoroguanosine
  modified_base 11: mod_base = OTHER; note = 2'-fluoroguanosine
  modified_base 12: mod_base = cm
  modified_base 13: mod_base = cm
  modified_base 14: mod_base = um
  modified_base 15: mod_base = um
  modified_base 16: mod_base = cm
  modified_base 17: mod_base = OTHER; note = 2'-O-methylinosine
  modified_base 18: mod_base = OTHER; note = 2'-O-methyladenosine
  modified_base 19: mod_base = gm
  modified_base 20: mod_base = um
  modified_base 21: mod_base = OTHER; note = 2'-O-methyladenosine-phosphorothioate-inverted abasic deoxyribonucleotide
  source 1..21: mol_type = other RNA
gctgatgaaggccttcnagta

SEQ ID NO: 771 - RNA, 21 nt, synthetic construct
  modified_base 1: mod_base = OTHER; note = inverted abasic deoxyribonucleotide-phosphorothioate-2'-O-methylcytidine
  modified_base 2: mod_base = gm
  modified_base 3: mod_base = cm
  modified_base 4: mod_base = um
  modified_base 5: mod_base = gm
  modified_base 6: mod_base = cm
  modified_base 7: mod_base = OTHER; note = 2'-O-methyladenosine
  modified_base 8: mod_base = cm
  modified_base 9: mod_base = OTHER; note = 2'-fluorocytidine
  modified_base 10: mod_base = OTHER; note = 2'-fluoroguanosine
  modified_base 11: mod_base = OTHER; note = 2'-fluoroadenosine
  modified_base 12: mod_base = cm
  modified_base 13: mod_base = cm
  modified_base 14: mod_base = OTHER; note = 2'-O-methyladenosine
  modified_base 15: mod_base = OTHER; note = 2'-O-methyladenosine
  modified_base 16: mod_base = OTHER; note = 2'-O-methyladenosine
  modified_base 17: mod_base = gm
  modified_base 18: mod_base = OTHER; note = 2'-O-methyladenosine
  modified_base 19: mod_base = OTHER; note = 2'-O-methyladenosine
  modified_base 20: mod_base = OTHER; note = 2'-O-methyladenosine
  modified_base 21: mod_base = OTHER; note = 2'-O-methyladenosine-phosphorothioate-inverted abasic deoxyribonucleotide
  source 1..21: mol_type = other RNA
cgctgcaccgaccaaagaaaa

SEQ ID NO: 772 - RNA, 21 nt, synthetic construct
  modified_base 1: mod_base = OTHER; note = inverted abasic deoxyribonucleotide-phosphorothioate-2'-O-methylguanosine
  modified_base 2: mod_base = cm
  modified_base 3: mod_base = um
  modified_base 4: mod_base = gm
  modified_base 5: mod_base = cm
  modified_base 6: mod_base = OTHER; note = 2'-O-methyladenosine
  modified_base 7: mod_base = cm
  modified_base 8: mod_base = cm
  modified_base 9: mod_base = OTHER; note = 2'-fluoroguanosine
  modified_base 10: mod_base = OTHER; note = 2'-fluoroadenosine
  modified_base 11: mod_base = OTHER; note = 2'-fluorocytidine
  modified_base 12: mod_base = cm
  modified_base 13: mod_base = OTHER; note = 2'-O-methyladenosine
  modified_base 14: mod_base = OTHER; note = 2'-O-methyladenosine
  modified_base 15: mod_base = OTHER; note = 2'-O-methyladenosine
  modified_base 16: mod_base = gm
  modified_base 17: mod_base = OTHER; note = 2'-O-methyladenosine
  modified_base 18: mod_base = OTHER; note = 2'-O-methyladenosine
  modified_base 19: mod_base = OTHER; note = 2'-O-methyladenosine
  modified_base 20: mod_base = gm
  modified_base 21: mod_base = OTHER; note = 2'-O-methyladenosine-phosphorothioate-inverted abasic deoxyribonucleotide
  source 1..21: mol_type = other RNA
gctgcaccgaccaaagaaaga

SEQ ID NO: 773 - RNA, 21 nt, synthetic construct
  modified_base 1: mod_base = OTHER; note = inverted abasic deoxyribonucleotide-phosphorothioate-2'-O-methylcytidine
  modified_base 2: mod_base = um
  modified_base 3: mod_base = gm
  modified_base 4: mod_base = cm
  modified_base 5: mod_base = OTHER; note = 2'-O-methyladenosine
  modified_base 6: mod_base = cm
  modified_base 7: mod_base = cm
  modified_base 8: mod_base = gm
  modified_base 9: mod_base = OTHER; note = 2'-fluoroadenosine
  modified_base 10: mod_base = OTHER; note = 2'-fluorocytidine
  modified_base 11: mod_base = OTHER; note = 2'-fluorocytidine
  modified_base 12: mod_base = OTHER; note = 2'-O-methyladenosine
  modified_base 13: mod_base = OTHER; note = 2'-O-methyladenosine
  modified_base 14: mod_base = OTHER; note = 2'-O-methyladenosine
  modified_base 15: mod_base = gm
  modified_base 16: mod_base = OTHER; note = 2'-O-methyladenosine
  modified_base 17: mod_base = OTHER; note = 2'-O-methyladenosine
  modified_base 18: mod_base = OTHER; note = 2'-O-methyladenosine
  modified_base 19: mod_base = gm
  modified_base 20: mod_base = OTHER; note = 2'-O-methyladenosine
  modified_base 21: mod_base = OTHER; note = 2'-O-methyladenosine-phosphorothioate-inverted abasic deoxyribonucleotide
  source 1..21: mol_type = other RNA
ctgcaccgaccaaagaaagaa

SEQ ID NO: 774 - RNA, 21 nt, synthetic construct
  modified_base 1: mod_base = OTHER; note = inverted abasic deoxyribonucleotide-phosphorothioate-2'-O-methylcytidine
  modified_base 2: mod_base = um
  modified_base 3: mod_base = gm
  modified_base 4: mod_base = OTHER; note = 2'-O-methyladenosine
  modified_base 5: mod_base = um
  modified_base 6: mod_base = gm
  modified_base 7: mod_base = OTHER; note = 2'-O-methyladenosine
  modified_base 8: mod_base = OTHER; note = 2'-O-methyladenosine
  modified_base 9: mod_base = OTHER; note = 2'-fluoroguanosine
  modified_base 10: mod_base = gm
  modified_base 11: mod_base = OTHER; note = 2'-fluorocytidine
  modified_base 12: mod_base = cm
  modified_base 13: mod_base = um
  modified_base 14: mod_base = um
  modified_base 15: mod_base = cm
  modified_base 16: mod_base = gm
  modified_base 17: mod_base = OTHER; note = 2'-O-methyladenosine
  modified_base 18: mod_base = gm
  modified_base 19: mod_base = um
  modified_base 20: mod_base = cm
  modified_base 21: mod_base = OTHER; note = 2'-O-methyladenosine-phosphorothioate-inverted abasic deoxyribonucleotide
  source 1..21: mol_type = other RNA
ctgatgaaggccttcgagtca

SEQ ID NO: 775 - RNA, 21 nt, synthetic construct
  modified_base 1: mod_base = OTHER; note = inverted abasic deoxyribonucleotide-phosphorothioate-2'-O-methylcytidine
  modified_base 2: mod_base = um
  modified_base 3: mod_base = gm
  modified_base 4: mod_base = OTHER; note = 2'-O-methyladenosine
  modified_base 5: mod_base = um
  modified_base 6: mod_base = gm
  modified_base 7: mod_base = OTHER; note = 2'-fluoroadenosine
  modified_base 8: mod_base = OTHER; note = 2'-O-methyladenosine
  modified_base 9: mod_base = OTHER; note = 2'-fluoroguanosine
  modified_base 10: mod_base = gm
  modified_base 11: mod_base = OTHER; note = 2'-fluorocytidine
  modified_base 12: mod_base = cm
  modified_base 13: mod_base = um
  modified_base 14: mod_base = um
  modified_base 15: mod_base = cm
  modified_base 16: mod_base = gm
  modified_base 17: mod_base = OTHER; note = 2'-O-methyladenosine
  modified_base 18: mod_base = gm
  modified_base 19: mod_base = um
  modified_base 20: mod_base = cm
  modified_base 21: mod_base = OTHER; note = 2'-O-methyladenosine-phosphorothioate-inverted abasic deoxyribonucleotide
  source 1..21: mol_type = other RNA
ctgatgaaggccttcgagtca

SEQ ID NO: 776 - RNA, 21 nt, synthetic construct
  modified_base 1: mod_base = OTHER; note = inverted abasic deoxyribonucleotide-phosphorothioate-2'-O-methylcytidine
  modified_base 2: mod_base = um
  modified_base 3: mod_base = gm
  modified_base 4: mod_base = OTHER; note = 2'-O-methyladenosine
  modified_base 5: mod_base = um
  modified_base 6: mod_base = gm
  modified_base 7: mod_base = OTHER; note = 2'-O-methyladenosine
  modified_base 8: mod_base = OTHER; note = 2'-O-methyladenosine
  modified_base 9: mod_base = OTHER; note = 2'-fluoroguanosine
  modified_base 10: mod_base = gm
  modified_base 11: mod_base = OTHER; note = 2'-fluorocytidine
  modified_base 12: mod_base = OTHER; note = 2'-fluorocytidine
  modified_base 13: mod_base = um
  modified_base 14: mod_base = um
  modified_base 15: mod_base = cm
  modified_base 16: mod_base = gm
  modified_base 17: mod_base = OTHER; note = 2'-O-methyladenosine
  modified_base 18: mod_base = gm
  modified_base 19: mod_base = um
  modified_base 20: mod_base = cm
  modified_base 21: mod_base = OTHER; note = 2'-O-methyladenosine-phosphorothioate-inverted abasic deoxyribonucleotide
  source 1..21: mol_type = other RNA
ctgatgaaggccttcgagtca

SEQ ID NO: 777 - RNA, 21 nt, synthetic construct
  modified_base 1: mod_base = OTHER; note = inverted abasic deoxyribonucleotide-phosphorothioate-2'-O-methylcytidine
  modified_base 2: mod_base = um
  modified_base 3: mod_base = um
  modified_base 4: mod_base = gm
  modified_base 5: mod_base = OTHER; note = 2'-O-methyladenosine
  modified_base 6: mod_base = OTHER; note = 2'-O-methyladenosine
  modified_base 7: mod_base = cm
  modified_base 8: mod_base = um
  modified_base 9: mod_base = OTHER; note = 2'-fluoroadenosine
  modified_base 10: mod_base = cm
  modified_base 11: mod_base = OTHER; note = 2'-fluoroadenosine
  modified_base 12: mod_base = um
  modified_base 13: mod_base = cm
  modified_base 14: mod_base = gm
  modified_base 15: mod_base = OTHER; note = 2'-O-methyladenosine
  modified_base 16: mod_base = um
  modified_base 17: mod_base = cm
  modified_base 18: mod_base = OTHER; note = 2'-O-methyladenosine
  modified_base 19: mod_base = um
  modified_base 20: mod_base = gm
  modified_base 21: mod_base = OTHER; note = 2'-O-methyladenosine-phosphorothioate-inverted abasic deoxyribonucleotide
  source 1..21: mol_type = other RNA
cttgaactacatcgatcatga

SEQ ID NO: 778 - RNA, 21 nt, synthetic construct
  modified_base 1: mod_base = OTHER; note = inverted abasic deoxyribonucleotide-phosphorothioate-2'-O-methylcytidine
  modified_base 2: mod_base = um
  modified_base 3: mod_base = um
  modified_base 4: mod_base = gm
  modified_base 5: mod_base = OTHER; note = 2'-O-methyladenosine
  modified_base 6: mod_base = OTHER; note = 2'-O-methyladenosine
  modified_base 7: mod_base = OTHER; note = 2'-fluorocytidine
  modified_base 8: mod_base = um
  modified_base 9: mod_base = OTHER; note = 2'-fluoroadenosine
  modified_base 10: mod_base = cm
  modified_base 11: mod_base = OTHER; note = 2'-fluoroadenosine
  modified_base 12: mod_base = um
  modified_base 13: mod_base = cm
  modified_base 14: mod_base = gm
  modified_base 15: mod_base = OTHER; note = 2'-O-methyladenosine
  modified_base 16: mod_base = um
  modified_base 17: mod_base = cm
  modified_base 18: mod_base = OTHER; note = 2'-O-methyladenosine
  modified_base 19: mod_base = um
  modified_base 20: mod_base = gm
  modified_base 21: mod_base = OTHER; note = 2'-O-methyladenosine-phosphorothioate-inverted abasic deoxyribonucleotide
  source 1..21: mol_type = other RNA
cttgaactacatcgatcatga

SEQ ID NO: 779 - RNA, 21 nt, synthetic construct
  modified_base 1: mod_base = OTHER; note = inverted abasic deoxyribonucleotide-phosphorothioate-2'-O-methylcytidine
  modified_base 2: mod_base = um
  modified_base 3: mod_base = um
  modified_base 4: mod_base = gm
  modified_base 5: mod_base = OTHER; note = 2'-O-methyladenosine
  modified_base 6: mod_base = OTHER; note = 2'-O-methyladenosine
  modified_base 7: mod_base = cm
  modified_base 8: mod_base = um
  modified_base 9: mod_base = OTHER; note = 2'-fluoroadenosine
  modified_base 10: mod_base = cm
  modified_base 11: mod_base = OTHER; note = 2'-fluoroadenosine
  modified_base 12: mod_base = OTHER; note = 2'-fluorouridine
  modified_base 13: mod_base = cm
  modified_base 14: mod_base = gm
  modified_base 15: mod_base = OTHER; note = 2'-O-methyladenosine
  modified_base 16: mod_base = um
  modified_base 17: mod_base = cm
  modified_base 18: mod_base = OTHER; note = 2'-O-methyladenosine
  modified_base 19: mod_base = um
  modified_base 20: mod_base = gm
  modified_base 21: mod_base = OTHER; note = 2'-O-methyladenosine-phosphorothioate-inverted abasic deoxyribonucleotide
  source 1..21: mol_type = other RNA
cttgaactacatcgatcatga

SEQ ID NO: 780 - RNA, 21 nt, synthetic construct
  modified_base 1: mod_base = OTHER; note = inverted abasic deoxyribonucleotide-phosphorothioate-2'-O-methylcytidine
  modified_base 2: mod_base = um
  modified_base 3: mod_base = gm
  modified_base 4: mod_base = OTHER; note = 2'-O-methyladenosine
  modified_base 5: mod_base = cm
  modified_base 6: mod_base = gm
  modified_base 7: mod_base = um
  modified_base 8: mod_base = um
  modified_base 9: mod_base = OTHER; note = 2'-fluoroadenosine
  modified_base 10: mod_base = cm
  modified_base 11: mod_base = OTHER; note = 2'-fluoroadenosine
  modified_base 12: mod_base = um
  modified_base 13: mod_base = cm
  modified_base 14: mod_base = OTHER; note = 2'-O-methyladenosine
  modified_base 15: mod_base = um
  modified_base 16: mod_base = OTHER; note = 2'-O-methyladenosine
  modified_base 17: mod_base = cm
  modified_base 18: mod_base = OTHER; note = 2'-O-methyladenosine
  modified_base 19: mod_base = cm
  modified_base 20: mod_base = OTHER; note = 2'-O-methyladenosine
  modified_base 21: mod_base = OTHER; note = 2'-O-methyladenosine-phosphorothioate-inverted abasic deoxyribonucleotide
  source 1..21: mol_type = other RNA
ctgacgttacatcatacacaa

SEQ ID NO: 781 - RNA, 21 nt, synthetic construct
  modified_base 1: mod_base = OTHER; note = inverted abasic deoxyribonucleotide-phosphorothioate-2'-O-methylcytidine
  modified_base 2: mod_base = um
  modified_base 3: mod_base = gm
  modified_base 4: mod_base = OTHER; note = 2'-O-methyladenosine
  modified_base 5: mod_base = cm
  modified_base 6: mod_base = gm
  modified_base 7: mod_base = OTHER; note = 2'-fluorouridine
  modified_base 8: mod_base = um
  modified_base 9: mod_base = OTHER; note = 2'-fluoroadenosine
  modified_base 10: mod_base = cm
  modified_base 11: mod_base = OTHER; note = 2'-fluoroadenosine
  modified_base 12: mod_base = um
  modified_base 13: mod_base = cm
  modified_base 14: mod_base = OTHER; note = 2'-O-methyladenosine
  modified_base 15: mod_base = um
  modified_base 16: mod_base = OTHER; note = 2'-O-methyladenosine
  modified_base 17: mod_base = cm
  modified_base 18: mod_base = OTHER; note = 2'-O-methyladenosine
  modified_base 19: mod_base = cm
  modified_base 20: mod_base = OTHER; note = 2'-O-methyladenosine
  modified_base 21: mod_base = OTHER; note = 2'-O-methyladenosine-phosphorothioate-inverted abasic deoxyribonucleotide
  source 1..21: mol_type = other RNA
ctgacgttacatcatacacaa

SEQ ID NO: 782 - RNA, 21 nt, synthetic construct
  modified_base 1: mod_base = OTHER; note = inverted abasic deoxyribonucleotide-phosphorothioate-2'-O-methylcytidine
  modified_base 2: mod_base = um
  modified_base 3: mod_base = gm
  modified_base 4: mod_base = OTHER; note = 2'-O-methyladenosine
  modified_base 5: mod_base = cm
  modified_base 6: mod_base = gm
  modified_base 7: mod_base = um
  modified_base 8: mod_base = um
  modified_base 9: mod_base = OTHER; note = 2'-fluoroadenosine
  modified_base 10: mod_base = cm
  modified_base 11: mod_base = OTHER; note = 2'-fluoroadenosine
  modified_base 12: mod_base = OTHER; note = 2'-fluorouridine
  modified_base 13: mod_base = cm
  modified_base 14: mod_base = OTHER; note = 2'-O-methyladenosine
  modified_base 15: mod_base = um
  modified_base 16: mod_base = OTHER; note = 2'-O-methyladenosine
  modified_base 17: mod_base = cm
  modified_base 18: mod_base = OTHER; note = 2'-O-methyladenosine
  modified_base 19: mod_base = cm
  modified_base 20: mod_base = OTHER; note = 2'-O-methyladenosine
  modified_base 21: mod_base = OTHER; note = 2'-O-methyladenosine-phosphorothioate-inverted abasic deoxyribonucleotide
  source 1..21: mol_type = other RNA
ctgacgttacatcatacacaa

SEQ ID NO: 783 - RNA, 21 nt, synthetic construct
  modified_base 1: mod_base = OTHER; note = inverted abasic deoxyribonucleotide-phosphorothioate-2'-O-methylcytidine
  modified_base 2: mod_base = OTHER; note = 2'-O-methyladenosine
  modified_base 3: mod_base = gm
  modified_base 4: mod_base = gm
  modified_base 5: mod_base = um
  modified_base 6: mod_base = gm
  modified_base 7: mod_base = um
  modified_base 8: mod_base = um
  modified_base 9: mod_base = OTHER; note = 2'-fluorouridine
  modified_base 10: mod_base = OTHER; note = 2'-O-methyladenosine
  modified_base 11: mod_base = OTHER; note = 2'-fluorouridine
  modified_base 12: mod_base = um
  modified_base 13: mod_base = gm
  modified_base 14: mod_base = gm
  modified_base 15: mod_base = cm
  modified_base 16: mod_base = um
  modified_base 17: mod_base = um
  modified_base 18: mod_base = um
  modified_base 19: mod_base = gm
  modified_base 20: mod_base = um
  modified_base 21: mod_base = OTHER; note = 2'-O-methyladenosine-phosphorothioate-inverted abasic deoxyribonucleotide
  source 1..21: mol_type = other RNA
caggtgtttattggctttgta

SEQ ID NO: 784 - RNA, 21 nt, synthetic construct
  modified_base 1: mod_base = OTHER; note = inverted abasic deoxyribonucleotide-phosphorothioate-2'-O-methylcytidine
  modified_base 2: mod_base = OTHER; note = 2'-O-methyladenosine
  modified_base 3: mod_base = gm
  modified_base 4: mod_base = gm
  modified_base 5: mod_base = um
  modified_base 6: mod_base = gm
  modified_base 7: mod_base = OTHER; note = 2'-fluorouridine
  modified_base 8: mod_base = um
  modified_base 9: mod_base = OTHER; note = 2'-fluorouridine
  modified_base 10: mod_base = OTHER; note = 2'-O-methyladenosine
  modified_base 11: mod_base = OTHER; note = 2'-fluorouridine
  modified_base 12: mod_base = um
  modified_base 13: mod_base = gm
  modified_base 14: mod_base = gm
  modified_base 15: mod_base = cm
  modified_base 16: mod_base = um
  modified_base 17: mod_base = um
  modified_base 18: mod_base = um
  modified_base 19: mod_base = gm
  modified_base 20: mod_base = um
  modified_base 21: mod_base = OTHER; note = 2'-O-methyladenosine-phosphorothioate-inverted abasic deoxyribonucleotide
  source 1..21: mol_type = other RNA
caggtgtttattggctttgta

SEQ ID NO: 785 - RNA, 21 nt, synthetic construct
  modified_base 1: mod_base = OTHER; note = inverted abasic deoxyribonucleotide-phosphorothioate-2'-O-methylcytidine
  modified_base 2: mod_base = OTHER; note = 2'-O-methyladenosine
  modified_base 3: mod_base = gm
  modified_base 4: mod_base = gm
  modified_base 5: mod_base = um
  modified_base 6: mod_base = gm
  modified_base 7: mod_base = um
  modified_base 8: mod_base = um
  modified_base 9: mod_base = OTHER; note = 2'-fluorouridine
  modified_base 10: mod_base = OTHER; note = 2'-O-methyladenosine
  modified_base 11: mod_base = OTHER; note = 2'-fluorouridine
  modified_base 12: mod_base = OTHER; note = 2'-fluorouridine
  modified_base 13: mod_base = gm
  modified_base 14: mod_base = gm
  modified_base 15: mod_base = cm
  modified_base 16: mod_base = um
  modified_base 17: mod_base = um
  modified_base 18: mod_base = um
  modified_base 19: mod_base = gm
  modified_base 20: mod_base = um
  modified_base 21: mod_base = OTHER; note = 2'-O-methyladenosine-phosphorothioate-inverted abasic deoxyribonucleotide
  source 1..21: mol_type = other RNA
caggtgtttattggctttgta

SEQ ID NO: 786 - RNA, 21 nt, synthetic construct
  modified_base 1: mod_base = OTHER; note = 5'-6-aminohexyl phosphorothioate-L20-Fab0016-inverted abasic deoxyribonucleotide-phosphorothioate-2'-O-methylcytidine
  modified_base 2: mod_base = um
  modified_base 3: mod_base = gm
  modified_base 4: mod_base = OTHER; note = 2'-O-methyladenosine
  modified_base 5: mod_base = cm
  modified_base 6: mod_base = gm
  modified_base 7: mod_base = um
  modified_base 8: mod_base = um
  modified_base 9: mod_base = OTHER; note = 2'-fluoroadenosine
  modified_base 10: mod_base = OTHER; note = 2'-fluorocytidine
  modified_base 11: mod_base = OTHER; note = 2'-fluoroadenosine
  modified_base 12: mod_base = um
  modified_base 13: mod_base = cm
  modified_base 14: mod_base = OTHER; note = 2'-O-methyladenosine
  modified_base 15: mod_base = um
  modified_base 16: mod_base = OTHER; note = 2'-O-methyladenosine
  modified_base 17: mod_base = cm
  modified_base 18: mod_base = OTHER; note = 2'-O-methyladenosine
  modified_base 19: mod_base = cm
  modified_base 20: mod_base = OTHER; note = 2'-O-methyladenosine
  modified_base 21: mod_base = OTHER; note = 2'-O-methyladenosine-phosphorothioate-inverted abasic deoxyribonucleotide
  source 1..21: mol_type = other RNA
ctgacgttacatcatacacaa

SEQ ID NO: 787 - RNA, 21 nt, synthetic construct
  modified_base 1: mod_base = OTHER; note = 5'-6-aminohexyl phosphorothioate-L20-Fab0016-inverted abasic deoxyribonucleotide-phosphorothioate-2'-O-methylcytidine
  modified_base 2: mod_base = um
  modified_base 3: mod_base = um
  modified_base 4: mod_base = gm
  modified_base 5: mod_base = OTHER; note = 2'-O-methyladenosine
  modified_base 6: mod_base = OTHER; note = 2'-O-methyladenosine
  modified_base 7: mod_base = cm
  modified_base 8: mod_base = um
  modified_base 9: mod_base = OTHER; note = 2'-fluoroadenosine
  modified_base 10: mod_base = OTHER; note = 2'-fluorocytidine
  modified_base 11: mod_base = OTHER; note = 2'-fluoroadenosine
  modified_base 12: mod_base = um
  modified_base 13: mod_base = cm
  modified_base 14: mod_base = gm
  modified_base 15: mod_base = OTHER; note = 2'-O-methyladenosine
  modified_base 16: mod_base = um
  modified_base 17: mod_base = cm
  modified_base 18: mod_base = OTHER; note = 2'-O-methyladenosine
  modified_base 19: mod_base = um
  modified_base 20: mod_base = gm
  modified_base 21: mod_base = OTHER; note = 2'-O-methyladenosine-phosphorothioate-inverted abasic deoxyribonucleotide
  source 1..21: mol_type = other RNA
cttgaactacatcgatcatga

SEQ ID NO: 788 - RNA, 21 nt, synthetic construct
  modified_base 1: mod_base = OTHER; note = 5'-6-aminohexyl phosphorothioate-L20-Fab0016-inverted abasic deoxyribonucleotide-phosphorothioate-2'-O-methylcytidine
  modified_base 2: mod_base = OTHER; note = 2'-O-methyladenosine
  modified_base 3: mod_base = gm
  modified_base 4: mod_base = gm
  modified_base 5: mod_base = um
  modified_base 6: mod_base = gm
  modified_base 7: mod_base = um
  modified_base 8: mod_base = um
  modified_base 9: mod_base = OTHER; note = 2'-fluorouridine
  modified_base 10: mod_base = OTHER; note = 2'-fluoroadenosine
  modified_base 11: mod_base = OTHER; note = 2'-fluorouridine
  modified_base 12: mod_base = um
  modified_base 13: mod_base = gm
  modified_base 14: mod_base = gm
  modified_base 15: mod_base = cm
  modified_base 16: mod_base = um
  modified_base 17: mod_base = um
  modified_base 18: mod_base = um
  modified_base 19: mod_base = gm
  modified_base 20: mod_base = um
  modified_base 21: mod_base = OTHER; note = 2'-O-methyladenosine-phosphorothioate-inverted abasic deoxyribonucleotide
  source 1..21: mol_type = other RNA
caggtgtttattggctttgta

SEQ ID NO: 789 - RNA, 21 nt, synthetic construct
  modified_base 1: mod_base = OTHER; note = 5'-6-aminohexyl phosphorothioate-L20-Fab0016-inverted abasic deoxyribonucleotide-phosphorothioate-2'-O-methyladenosine
  modified_base 2: mod_base = gm
  modified_base 3: mod_base = gm
  modified_base 4: mod_base = cm
  modified_base 5: mod_base = OTHER; note = 2'-O-methyladenosine
  modified_base 6: mod_base = OTHER; note = 2'-O-methyladenosine
  modified_base 7: mod_base = um
  modified_base 8: mod_base = um
  modified_base 9: mod_base = OTHER; note = 2'-fluorocytidine
  modified_base 10: mod_base = OTHER; note = 2'-fluoroadenosine
  modified_base 11: mod_base = OTHER; note = 2'-fluoroguanosine
  modified_base 12: mod_base = um
  modified_base 13: mod_base = cm
  modified_base 14: mod_base = um
  modified_base 15: mod_base = cm
  modified_base 16: mod_base = gm
  modified_base 17: mod_base = um
  modified_base 18: mod_base = um
  modified_base 19: mod_base = gm
  modified_base 20: mod_base = um
  modified_base 21: mod_base = OTHER; note = 2'-O-methyladenosine-phosphorothioate-inverted abasic deoxyribonucleotide
  source 1..21: mol_type = other RNA
aggcaattcagtctcgttgta

SEQ ID NO: 790 - RNA, 21 nt, synthetic construct
  modified_base 1: mod_base = OTHER; note = 5'-6-(16-hydroxyhexadecanamido)hexyl phosphorothioate-inverted abasic deoxyribonucleotide-phosphorothioate-2'-O-methylcytidine
  modified_base 2: mod_base = um
  modified_base 3: mod_base = gm
  modified_base 4: mod_base = OTHER; note = 2'-O-methyladenosine
  modified_base 5: mod_base = um
  modified_base 6: mod_base = gm
  modified_base 7: mod_base = OTHER; note = 2'-O-methyladenosine
  modified_base 8: mod_base = OTHER; note = 2'-O-methyladenosine
  modified_base 9: mod_base = OTHER; note = 2'-fluoroguanosine
  modified_base 10: mod_base = OTHER; note = 2'-fluoroguanosine
  modified_base 11: mod_base = OTHER; note = 2'-fluorocytidine
  modified_base 12: mod_base = um
  modified_base 13: mod_base = um
  modified_base 14: mod_base = um
  modified_base 15: mod_base = cm
  modified_base 16: mod_base = gm
  modified_base 17: mod_base = OTHER; note = 2'-O-methyladenosine
  modified_base 18: mod_base = gm
  modified_base 19: mod_base = um
  modified_base 20: mod_base = cm
  modified_base 21: mod_base = OTHER; note = 2'-O-methyladenosine-phosphorothioate-inverted abasic deoxyribonucleotide
  source 1..21: mol_type = other RNA
ctgatgaaggctttcgagtca

SEQ ID NO: 791 - RNA, 21 nt, synthetic construct
  modified_base 1: mod_base = OTHER; note = 5'-6-(16-hydroxyhexadecanamido)hexyl phosphorothioate-inverted abasic deoxyribonucleotide-phosphorothioate-2'-O-methylcytidine
  modified_base 2: mod_base = um
  modified_base 3: mod_base = gm
  modified_base 4: mod_base = gm
  modified_base 5: mod_base = OTHER; note = 2'-O-methyladenosine
  modified_base 6: mod_base = gm
  modified_base 7: mod_base = cm
  modified_base 8: mod_base = OTHER; note = 2'-O-methyladenosine
  modified_base 9: mod_base = OTHER; note = 2'-fluoroadenosine
  modified_base 10: mod_base = OTHER; note = 2'-fluoroguanosine
  modified_base 11: mod_base = OTHER; note = 2'-fluorouridine
  modified_base 12: mod_base = um
  modified_base 13: mod_base = gm
  modified_base 14: mod_base = OTHER; note = 2'-O-methyladenosine
  modified_base 15: mod_base = OTHER; note = 2'-O-methyladenosine
  modified_base 16: mod_base = um
  modified_base 17: mod_base = gm
  modified_base 18: mod_base = OTHER; note = 2'-O-methyladenosine
  modified_base 19: mod_base = um
  modified_base 20: mod_base = cm
  modified_base 21: mod_base = OTHER; note = 2'-O-methyladenosine-phosphorothioate-inverted abasic deoxyribonucleotide
  source 1..21: mol_type = other RNA
ctggagcaagttgaatgatca

SEQ ID NO: 792 - RNA, 21 nt, synthetic construct
  modified_base 1: mod_base = OTHER; note = 5'-6-(16-hydroxyhexadecanamido)hexyl phosphorothioate-inverted abasic deoxyribonucleotide-phosphorothioate-2'-O-methylcytidine
  modified_base 2: mod_base = um
  modified_base 3: mod_base = gm
  modified_base 4: mod_base = gm
  modified_base 5: mod_base = OTHER; note = 2'-O-methyladenosine
  modified_base 6: mod_base = gm
  modified_base 7: mod_base = cm
  modified_base 8: mod_base = OTHER; note = 2'-O-methyladenosine
  modified_base 9: mod_base = OTHER; note = 2'-fluoroadenosine
  modified_base 10: mod_base = gm
  modified_base 11: mod_base = OTHER; note = 2'-fluorouridine
  modified_base 12: mod_base = um
  modified_base 13: mod_base = gm
  modified_base 14: mod_base = OTHER; note = 2'-O-methyladenosine
  modified_base 15: mod_base = OTHER; note = 2'-O-methyladenosine
  modified_base 16: mod_base = um
  modified_base 17: mod_base = gm
  modified_base 18: mod_base = OTHER; note = 2'-O-methyladenosine
  modified_base 19: mod_base = um
  modified_base 20: mod_base = cm
  modified_base 21: mod_base = OTHER; note = um-phosphorothioate-inverted abasic deoxyribonucleotide
  source 1..21: mol_type = other RNA
ctggagcaagttgaatgatct

SEQ ID NO: 793 - RNA, 21 nt, synthetic construct
  modified_base 1: mod_base = OTHER; note = 5'-6-(16-hydroxyhexadecanamido)hexyl phosphorothioate-inverted abasic deoxyribonucleotide-phosphorothioate-2'-O-methylcytidine
  modified_base 2: mod_base = um
  modified_base 3: mod_base = gm
  modified_base 4: mod_base = gm
  modified_base 5: mod_base = OTHER; note = 2'-O-methyladenosine
  modified_base 6: mod_base = gm
  modified_base 7: mod_base = cm
  modified_base 8: mod_base = OTHER; note = 2'-O-methyladenosine
  modified_base 9: mod_base = OTHER; note = 2'-fluoroadenosine
  modified_base 10: mod_base = gm
  modified_base 11: mod_base = OTHER; note = 2'-fluorouridine
  modified_base 12: mod_base = OTHER; note = 2'-fluorouridine
  modified_base 13: mod_base = gm
  modified_base 14: mod_base = OTHER; note = 2'-O-methyladenosine
  modified_base 15: mod_base = OTHER; note = 2'-O-methyladenosine
  modified_base 16: mod_base = um
  modified_base 17: mod_base = gm
  modified_base 18: mod_base = OTHER; note = 2'-O-methyladenosine
  modified_base 19: mod_base = um
  modified_base 20: mod_base = cm
  modified_base 21: mod_base = OTHER; note = um-phosphorothioate-inverted abasic deoxyribonucleotide
  source 1..21: mol_type = other RNA
ctggagcaagttgaatgatct

SEQ ID NO: 794 - RNA, 21 nt, synthetic construct
  modified_base 1: mod_base = OTHER; note = 5'-6-(16-hydroxyhexadecanamido)hexyl phosphorothioate-inverted abasic deoxyribonucleotide-phosphorothioate-2'-O-methylcytidine
  modified_base 2: mod_base = um
  modified_base 3: mod_base = gm
  modified_base 4: mod_base = gm
  modified_base 5: mod_base = OTHER; note = 2'-O-methyladenosine
  modified_base 6: mod_base = gm
  modified_base 7: mod_base = cm
  modified_base 8: mod_base = OTHER; note = 2'-O-methyladenosine
  modified_base 9: mod_base = OTHER; note = 2'-fluoroadenosine
  modified_base 10: mod_base = gm
  modified_base 11: mod_base = OTHER; note = 2'-fluorouridine
  modified_base 12: mod_base = um
  modified_base 13: mod_base = OTHER; note = 2'-fluoroguanosine
  modified_base 14: mod_base = OTHER; note = 2'-O-methyladenosine
  modified_base 15: mod_base = OTHER; note = 2'-O-methyladenosine
  modified_base 16: mod_base = um
  modified_base 17: mod_base = gm
  modified_base 18: mod_base = OTHER; note = 2'-O-methyladenosine
  modified_base 19: mod_base = um
  modified_base 20: mod_base = cm
  modified_base 21: mod_base = OTHER; note = um-phosphorothioate-inverted abasic deoxyribonucleotide
  source 1..21: mol_type = other RNA
ctggagcaagttgaatgatct

SEQ ID NO: 795 - RNA, 21 nt, synthetic construct
  modified_base 1: mod_base = OTHER; note = 5'-6-(16-hydroxyhexadecanamido)hexyl phosphorothioate-inverted abasic deoxyribonucleotide-phosphorothioate-2'-O-methylcytidine
  modified_base 2: mod_base = um
  modified_base 3: mod_base = gm
  modified_base 4: mod_base = gm
  modified_base 5: mod_base = OTHER; note = 2'-O-methyladenosine
  modified_base 6: mod_base = gm
  modified_base 7: mod_base = cm
  modified_base 8: mod_base = OTHER; note = 2'-O-methyladenosine
  modified_base 9: mod_base = OTHER; note = 2'-fluoroadenosine
  modified_base 10: mod_base = OTHER; note = 2'-fluoroguanosine
  modified_base 11: mod_base = OTHER; note = 2'-fluorouridine
  modified_base 12: mod_base = um
  modified_base 13: mod_base = gm
  modified_base 14: mod_base = OTHER; note = 2'-O-methyladenosine
  modified_base 15: mod_base = OTHER; note = 2'-O-methyladenosine
  modified_base 16: mod_base = um
  modified_base 17: mod_base = gm
  modified_base 18: mod_base = OTHER; note = 2'-O-methyladenosine
  modified_base 19: mod_base = um
  modified_base 20: mod_base = um
  modified_base 21: mod_base = OTHER; note = um-phosphorothioate-inverted abasic deoxyribonucleotide
  source 1..21: mol_type = other RNA
ctggagcaagttgaatgattt

SEQ ID NO: 796 - RNA, 21 nt, synthetic construct
  modified_base 1: mod_base = OTHER; note = 5'-6-(16-hydroxyhexadecanamido)hexyl phosphorothioate-inverted abasic deoxyribonucleotide-phosphorothioate-2'-O-methyladenosine
  modified_base 2: mod_base = gm
  modified_base 3: mod_base = gm
  modified_base 4: mod_base = cm
  modified_base 5: mod_base = OTHER; note = 2'-O-methyladenosine
  modified_base 6: mod_base = OTHER; note = 2'-O-methyladenosine
  modified_base 7: mod_base = um
  modified_base 8: mod_base = um
  modified_base 9: mod_base = OTHER; note = 2'-fluorocytidine
  modified_base 10: mod_base = OTHER; note = 2'-O-methyladenosine
  modified_base 11: mod_base = OTHER; note = 2'-fluoroguanosine
  modified_base 12: mod_base = um
  modified_base 13: mod_base = cm
  modified_base 14: mod_base = um
  modified_base 15: mod_base = cm
  modified_base 16: mod_base = gm
  modified_base 17: mod_base = um
  modified_base 18: mod_base = um
  modified_base 19: mod_base = gm
  modified_base 20: mod_base = um
  modified_base 21: mod_base = OTHER; note = 2'-O-methyladenosine-phosphorothioate-inverted abasic deoxyribonucleotide
  source 1..21: mol_type = other RNA
aggcaattcagtctcgttgta

SEQ ID NO: 797 - RNA, 21 nt, synthetic construct
  modified_base 1: mod_base = OTHER; note = 5'-6-(16-hydroxyhexadecanamido)hexyl phosphorothioate-inverted abasic deoxyribonucleotide-phosphorothioate-2'-O-methyladenosine
  modified_base 2: mod_base = gm
  modified_base 3: mod_base = gm
  modified_base 4: mod_base = cm
  modified_base 5: mod_base = OTHER; note = 2'-O-methyladenosine
  modified_base 6: mod_base = OTHER; note = 2'-O-methyladenosine
  modified_base 7: mod_base = um
  modified_base 8: mod_base = um
  modified_base 9: mod_base = OTHER; note = 2'-fluorocytidine
  modified_base 10: mod_base = OTHER; note = 2'-O-methyladenosine
  modified_base 11: mod_base = OTHER; note = 2'-fluoroguanosine
  modified_base 12: mod_base = OTHER; note = 2'-fluorouridine
  modified_base 13: mod_base = cm
  modified_base 14: mod_base = um
  modified_base 15: mod_base = cm
  modified_base 16: mod_base = gm
  modified_base 17: mod_base = um
  modified_base 18: mod_base = um
  modified_base 19: mod_base = gm
  modified_base 20: mod_base = um
  modified_base 21: mod_base = OTHER; note = 2'-O-methyladenosine-phosphorothioate-inverted abasic deoxyribonucleotide
  source 1..21: mol_type = other RNA
aggcaattcagtctcgttgta

SEQ ID NO: 798 - RNA, 21 nt, synthetic construct
  modified_base 1: mod_base = OTHER; note = 5'-6-(16-hydroxyhexadecanamido)hexyl phosphorothioate-inverted abasic deoxyribonucleotide-phosphorothioate-2'-O-methyladenosine
  modified_base 2: mod_base = gm
  modified_base 3: mod_base = gm
  modified_base 4: mod_base = cm
  modified_base 5: mod_base = OTHER; note = 2'-O-methyladenosine
  modified_base 6: mod_base = OTHER; note = 2'-O-methyladenosine
  modified_base 7: mod_base = um
  modified_base 8: mod_base = um
  modified_base 9: mod_base = OTHER; note = 2'-fluorocytidine
  modified_base 10: mod_base = OTHER; note = 2'-O-methyladenosine
  modified_base 11: mod_base = OTHER; note = 2'-fluoroguanosine
  modified_base 12: mod_base = um
  modified_base 13: mod_base = OTHER; note = 2'-fluorocytidine
  modified_base 14: mod_base = um
  modified_base 15: mod_base = cm
  modified_base 16: mod_base = gm
  modified_base 17: mod_base = um
  modified_base 18: mod_base = um
  modified_base 19: mod_base = gm
  modified_base 20: mod_base = um
  modified_base 21: mod_base = OTHER; note = 2'-O-methyladenosine-phosphorothioate-inverted abasic deoxyribonucleotide
  source 1..21: mol_type = other RNA
aggcaattcagtctcgttgta

SEQ ID NO: 799 - RNA, 21 nt, synthetic construct
  modified_base 1: mod_base = OTHER; note = 5'-6-(16-hydroxyhexadecanamido)hexyl phosphorothioate-inverted abasic deoxyribonucleotide-phosphorothioate-2'-O-methyladenosine
  modified_base 2: mod_base = gm
  modified_base 3: mod_base = gm
  modified_base 4: mod_base = cm
  modified_base 5: mod_base = OTHER; note = 2'-O-methyladenosine
  modified_base 6: mod_base = OTHER; note = 2'-O-methyladenosine
  modified_base 7: mod_base = um
  modified_base 8: mod_base = um
  modified_base 9: mod_base = OTHER; note = 2'-fluorocytidine
  modified_base 10: mod_base = OTHER; note = 2'-fluoroadenosine
  modified_base 11: mod_base = OTHER; note = 2'-fluoroguanosine
  modified_base 12: mod_base = um
  modified_base 13: mod_base = cm
  modified_base 14: mod_base = um
  modified_base 15: mod_base = um
  modified_base 16: mod_base = gm
  modified_base 17: mod_base = um
  modified_base 18: mod_base = um
  modified_base 19: mod_base = gm
  modified_base 20: mod_base = um
  modified_base 21: mod_base = OTHER; note = 2'-O-methyladenosine-phosphorothioate-inverted abasic deoxyribonucleotide
  source 1..21: mol_type = other RNA
aggcaattcagtcttgttgta

SEQ ID NO: 800 - RNA, 21 nt, synthetic construct
  modified_base 1: mod_base = OTHER; note = 5'-6-(16-hydroxyhexadecanamido)hexyl phosphorothioate-inverted abasic deoxyribonucleotide-phosphorothioate-2'-O-methyladenosine
  modified_base 2: mod_base = gm
  modified_base 3: mod_base = gm
  modified_base 4: mod_base = um
  modified_base 5: mod_base = OTHER; note = 2'-O-methyladenosine
  modified_base 6: mod_base = OTHER; note = 2'-O-methyladenosine
  modified_base 7: mod_base = um
  modified_base 8: mod_base = um
  modified_base 9: mod_base = OTHER; note = 2'-fluorocytidine
  modified_base 10: mod_base = OTHER; note = 2'-fluoroadenosine
  modified_base 11: mod_base = OTHER; note = 2'-fluoroguanosine
  modified_base 12: mod_base = um
  modified_base 13: mod_base = cm
  modified_base 14: mod_base = um
  modified_base 15: mod_base = cm
  modified_base 16: mod_base = gm
  modified_base 17: mod_base = um
  modified_base 18: mod_base = um
  modified_base 19: mod_base = gm
  modified_base 20: mod_base = um
  modified_base 21: mod_base = OTHER; note = 2'-O-methyladenosine-phosphorothioate-inverted abasic deoxyribonucleotide
  source 1..21: mol_type = other RNA
aggtaattcagtctcgttgta

SEQ ID NO: 801 - RNA, 21 nt, synthetic construct
  modified_base 1: mod_base = OTHER; note = 5'-6-(16-hydroxyhexadecanamido)hexyl phosphorothioate-inverted abasic deoxyribonucleotide-phosphorothioate-2'-O-methyladenosine
  modified_base 2: mod_base = gm
  modified_base 3: mod_base = gm
  modified_base 4: mod_base = cm
  modified_base 5: mod_base = OTHER; note = 2'-O-methyladenosine
  modified_base 6: mod_base = OTHER; note = 2'-O-methyladenosine
  modified_base 7: mod_base = um
  modified_base 8: mod_base = um
  modified_base 9: mod_base = OTHER; note = 2'-fluorocytidine
  modified_base 10: mod_base = OTHER; note = 2'-fluoroadenosine
  modified_base 11: mod_base = OTHER; note = 2'-fluoroguanosine
  modified_base 12: mod_base = um
  modified_base 13: mod_base = um
  modified_base 14: mod_base = um
  modified_base 15: mod_base = cm
  modified_base 16: mod_base = gm
  modified_base 17: mod_base = um
  modified_base 18: mod_base = um
  modified_base 19: mod_base = gm
  modified_base 20: mod_base = um
  modified_base 21: mod_base = OTHER; note = 2'-O-methyladenosine-phosphorothioate-inverted abasic deoxyribonucleotide
  source 1..21: mol_type = other RNA
aggcaattcagtttcgttgta

SEQ ID NO: 802 - RNA, 21 nt, synthetic construct
  modified_base 1: mod_base = OTHER; note = 5'-6-(16-hydroxyhexadecanamido)hexyl phosphorothioate-inverted abasic deoxyribonucleotide-phosphorothioate-2'-O-methylcytidine
  modified_base 2: mod_base = cm
  modified_base 3: mod_base = OTHER; note = 2'-O-methyladenosine
  modified_base 4: mod_base = um
  modified_base 5: mod_base = gm
  modified_base 6: mod_base = cm
  modified_base 7: mod_base = OTHER; note = 2'-O-methyladenosine
  modified_base 8: mod_base = OTHER; note = 2'-O-methyladenosine
  modified_base 9: mod_base = OTHER; note = 2'-fluoroguanosine
  modified_base 10: mod_base = OTHER; note = 2'-O-methyladenosine
  modified_base 11: mod_base = OTHER; note = 2'-fluorocytidine
  modified_base 12: mod_base = um
  modified_base 13: mod_base = cm
  modified_base 14: mod_base = OTHER; note = 2'-O-methyladenosine
  modified_base 15: mod_base = cm
  modified_base 16: mod_base = um
  modified_base 17: mod_base = um
  modified_base 18: mod_base = OTHER; note = 2'-O-methyladenosine
  modified_base 19: mod_base = gm
  modified_base 20: mod_base = um
  modified_base 21: mod_base = OTHER; note = 2'-O-methyladenosine-phosphorothioate-inverted abasic deoxyribonucleotide
  source 1..21: mol_type = other RNA
ccatgcaagactcacttagta

SEQ ID NO: 803 - RNA, 21 nt, synthetic construct
  modified_base 1: mod_base = OTHER; note = 5'-6-(16-hydroxyhexadecanamido)hexyl phosphorothioate-inverted abasic deoxyribonucleotide-phosphorothioate-2'-O-methylcytidine
  modified_base 2: mod_base = cm
  modified_base 3: mod_base = OTHER; note = 2'-O-methyladenosine
  modified_base 4: mod_base = um
  modified_base 5: mod_base = gm
  modified_base 6: mod_base = cm
  modified_base 7: mod_base = OTHER; note = 2'-O-methyladenosine
  modified_base 8: mod_base = OTHER; note = 2'-O-methyladenosine
  modified_base 9: mod_base = OTHER; note = 2'-fluoroguanosine
  modified_base 10: mod_base = OTHER; note = 2'-O-methyladenosine
  modified_base 11: mod_base = OTHER; note = 2'-fluorocytidine
  modified_base 12: mod_base = OTHER; note = 2'-fluorouridine
  modified_base 13: mod_base = cm
  modified_base 14: mod_base = OTHER; note = 2'-O-methyladenosine
  modified_base 15: mod_base = cm
  modified_base 16: mod_base = um
  modified_base 17: mod_base = um
  modified_base 18: mod_base = OTHER; note = 2'-O-methyladenosine
  modified_base 19: mod_base = gm
  modified_base 20: mod_base = um
  modified_base 21: mod_base = OTHER; note = 2'-O-methyladenosine-phosphorothioate-inverted abasic deoxyribonucleotide
  source 1..21: mol_type = other RNA
ccatgcaagactcacttagta

SEQ ID NO: 804 - RNA, 21 nt, synthetic construct
  modified_base 1: mod_base = OTHER; note = 5'-6-(16-hydroxyhexadecanamido)hexyl phosphorothioate-inverted abasic deoxyribonucleotide-phosphorothioate-2'-O-methylcytidine
  modified_base 2: mod_base = cm
  modified_base 3: mod_base = OTHER; note = 2'-O-methyladenosine
  modified_base 4: mod_base = um
  modified_base 5: mod_base = gm
  modified_base 6: mod_base = cm
  modified_base 7: mod_base = OTHER; note = 2'-O-methyladenosine
  modified_base 8: mod_base = OTHER; note = 2'-O-methyladenosine
  modified_base 9: mod_base = OTHER; note = 2'-fluoroguanosine
  modified_base 10: mod_base = OTHER; note = 2'-O-methyladenosine
  modified_base 11: mod_base = OTHER; note = 2'-fluorocytidine
  modified_base 12: mod_base = um
  modified_base 13: mod_base = OTHER; note = 2'-fluorocytidine
  modified_base 14: mod_base = OTHER; note = 2'-O-methyladenosine
  modified_base 15: mod_base = cm
  modified_base 16: mod_base = um
  modified_base 17: mod_base = um
  modified_base 18: mod_base = OTHER; note = 2'-O-methyladenosine
  modified_base 19: mod_base = gm
  modified_base 20: mod_base = um
  modified_base 21: mod_base = OTHER; note = 2'-O-methyladenosine-phosphorothioate-inverted abasic deoxyribonucleotide
  source 1..21: mol_type = other RNA
ccatgcaagactcacttagta

SEQ ID NO: 805 - RNA, 21 nt, synthetic construct
  modified_base 1: mod_base = OTHER; note = 5'-6-(16-hydroxyhexadecanamido)hexyl phosphorothioate-inverted abasic deoxyribonucleotide-phosphorothioate-2'-O-methylcytidine
  modified_base 2: mod_base = cm
  modified_base 3: mod_base = OTHER; note = 2'-O-methyladenosine
  modified_base 4: mod_base = um
  modified_base 5: mod_base = gm
  modified_base 6: mod_base = um
  modified_base 7: mod_base = OTHER; note = 2'-O-methyladenosine
  modified_base 8: mod_base = OTHER; note = 2'-O-methyladenosine
  modified_base 9: mod_base = OTHER; note = 2'-fluoroguanosine
  modified_base 10: mod_base = OTHER; note = 2'-fluoroadenosine
  modified_base 11: mod_base = OTHER; note = 2'-fluorocytidine
  modified_base 12: mod_base = um
  modified_base 13: mod_base = cm
  modified_base 14: mod_base = OTHER; note = 2'-O-methyladenosine
  modified_base 15: mod_base = cm
  modified_base 16: mod_base = um
  modified_base 17: mod_base = um
  modified_base 18: mod_base = OTHER; note = 2'-O-methyladenosine
  modified_base 19: mod_base = gm
  modified_base 20: mod_base = um
  modified_base 21: mod_base = OTHER; note = 2'-O-methyladenosine-phosphorothioate-inverted abasic deoxyribonucleotide
  source 1..21: mol_type = other RNA
ccatgtaagactcacttagta

SEQ ID NO: 806 - RNA, 21 nt, synthetic construct
  modified_base 1: mod_base = OTHER; note = 5'-6-(16-hydroxyhexadecanamido)hexyl phosphorothioate-inverted abasic deoxyribonucleotide-phosphorothioate-2'-O-methylcytidine
  modified_base 2: mod_base = cm
  modified_base 3: mod_base = OTHER; note = 2'-O-methyladenosine
  modified_base 4: mod_base = um
  modified_base 5: mod_base = gm
  modified_base 6: mod_base = cm
  modified_base 7: mod_base = OTHER; note = 2'-O-methyladenosine
  modified_base 8: mod_base = OTHER; note = 2'-O-methyladenosine
  modified_base 9: mod_base = OTHER; note = 2'-fluoroguanosine
  modified_base 10: mod_base = OTHER; note = 2'-fluoroadenosine
  modified_base 11: mod_base = OTHER; note = 2'-fluorocytidine
  modified_base 12: mod_base = um
  modified_base 13: mod_base = cm
  modified_base 14: mod_base = OTHER; note = 2'-O-methyladenosine
  modified_base 15: mod_base = um
  modified_base 16: mod_base = um
  modified_base 17: mod_base = um
  modified_base 18: mod_base = OTHER; note = 2'-O-methyladenosine
  modified_base 19: mod_base = gm
  modified_base 20: mod_base = um
  modified_base 21: mod_base = OTHER; note = 2'-O-methyladenosine-phosphorothioate-inverted abasic deoxyribonucleotide
  source 1..21: mol_type = other RNA
ccatgcaagactcatttagta

SEQ ID NO: 807 - RNA, 21 nt, synthetic construct
  modified_base 1: mod_base = OTHER; note = 5'-6-(16-hydroxyhexadecanamido)hexyl phosphorothioate-inverted abasic deoxyribonucleotide-phosphorothioate-2'-O-methylcytidine
  modified_base 2: mod_base = cm
  modified_base 3: mod_base = OTHER; note = 2'-O-methyladenosine
  modified_base 4: mod_base = um
  modified_base 5: mod_base = gm
  modified_base 6: mod_base = cm
  modified_base 7: mod_base = OTHER; note = 2'-O-methyladenosine
  modified_base 8: mod_base = OTHER; note = 2'-O-methyladenosine
  modified_base 9: mod_base = OTHER; note = 2'-fluoroguanosine
  modified_base 10: mod_base = OTHER; note = 2'-fluoroadenosine
  modified_base 11: mod_base = OTHER; note = 2'-fluorocytidine
  modified_base 12: mod_base = um
  modified_base 13: mod_base = um
  modified_base 14: mod_base = OTHER; note = 2'-O-methyladenosine
  modified_base 15: mod_base = cm
  modified_base 16: mod_base = um
  modified_base 17: mod_base = um
  modified_base 18: mod_base = OTHER; note = 2'-O-methyladenosine
  modified_base 19: mod_base = gm
  modified_base 20: mod_base = um
  modified_base 21: mod_base = OTHER; note = 2'-O-methyladenosine-phosphorothioate-inverted abasic deoxyribonucleotide
  source 1..21: mol_type = other RNA
ccatgcaagacttacttagta

SEQ ID NO: 808 - RNA, 21 nt, synthetic construct
  modified_base 1: mod_base = OTHER; note = 5'-6-aminohexyl phosphorothioate-L20-Fab0016-inverted abasic deoxyribonucleotide-phosphorothioate-2'-O-methylcytidine
  modified_base 2: mod_base = um
  modified_base 3: mod_base = gm
  modified_base 4: mod_base = OTHER; note = 2'-O-methyladenosine
  modified_base 5: mod_base = um
  modified_base 6: mod_base = gm
  modified_base 7: mod_base = OTHER; note = 2'-O-methyladenosine
  modified_base 8: mod_base = OTHER; note = 2'-O-methyladenosine
  modified_base 9: mod_base = OTHER; note = 2'-fluoroguanosine
  modified_base 10: mod_base = OTHER; note = 2'-fluoroguanosine
  modified_base 11: mod_base = OTHER; note = 2'-fluorocytidine
  modified_base 12: mod_base = cm
  modified_base 13: mod_base = um
  modified_base 14: mod_base = um
  modified_base 15: mod_base = cm
  modified_base 16: mod_base = gm
  modified_base 17: mod_base = OTHER; note = 2'-O-methyladenosine
  modified_base 18: mod_base = gm
  modified_base 19: mod_base = um
  modified_base 20: mod_base = cm
  modified_base 21: mod_base = OTHER; note = 2'-O-methyladenosine-phosphorothioate-inverted abasic deoxyribonucleotide
  source 1..21: mol_type = other RNA
ctgatgaaggccttcgagtca

SEQ ID NO: 809 - RNA, 21 nt, synthetic construct
  modified_base 1: mod_base = OTHER; note = 5'-6-aminohexyl phosphorothioate-L20-Fab0016-inverted abasic deoxyribonucleotide-phosphorothioate-2'-O-methylcytidine
  modified_base 2: mod_base = cm
  modified_base 3: mod_base = OTHER; note = 2'-O-methyladenosine
  modified_base 4: mod_base = gm
  modified_base 5: mod_base = cm
  modified_base 6: mod_base = OTHER; note = 2'-O-methyladenosine
  modified_base 7: mod_base = cm
  modified_base 8: mod_base = OTHER; note = 2'-O-methyladenosine
  modified_base 9: mod_base = OTHER; note = 2'-fluoroadenosine
  modified_base 10: mod_base = OTHER; note = 2'-fluoroadenosine
  modified_base 11: mod_base = OTHER; note = 2'-fluoroguanosine
  modified_base 12: mod_base = um
  modified_base 13: mod_base = um
  modified_base 14: mod_base = OTHER; note = 2'-O-methyladenosine
  modified_base 15: mod_base = cm
  modified_base 16: mod_base = um
  modified_base 17: mod_base = um
  modified_base 18: mod_base = OTHER; note = 2'-O-methyladenosine
  modified_base 19: mod_base = gm
  modified_base 20: mod_base = um
  modified_base 21: mod_base = OTHER; note = 2'-O-methyladenosine-phosphorothioate-inverted abasic deoxyribonucleotide
  source 1..21: mol_type = other RNA
ccagcacaaagttacttagta

SEQ ID NO: 810 - RNA, 21 nt, synthetic construct
  modified_base 1: mod_base = OTHER; note = 5'-6-aminohexyl phosphorothioate-L20-Fab0016-inverted abasic deoxyribonucleotide-phosphorothioate-2'-O-methylcytidine
  modified_base 2: mod_base = OTHER; note = 2'-O-methyladenosine
  modified_base 3: mod_base = gm
  modified_base 4: mod_base = um
  modified_base 5: mod_base = OTHER; note = 2'-O-methyladenosine
  modified_base 6: mod_base = cm
  modified_base 7: mod_base = OTHER; note = 2'-O-methyladenosine
  modified_base 8: mod_base = gm
  modified_base 9: mod_base = OTHER; note = 2'-fluoroguanosine
  modified_base 10: mod_base = OTHER; note = 2'-fluoroadenosine
  modified_base 11: mod_base = OTHER; note = 2'-fluorocytidine
  modified_base 12: mod_base = um
  modified_base 13: mod_base = um
  modified_base 14: mod_base = cm
  modified_base 15: mod_base = OTHER; note = 2'-O-methyladenosine
  modified_base 16: mod_base = um
  modified_base 17: mod_base = cm
  modified_base 18: mod_base = OTHER; note = 2'-O-methyladenosine
  modified_base 19: mod_base = gm
  modified_base 20: mod_base = um
  modified_base 21: mod_base = OTHER; note = 2'-O-methyladenosine-phosphorothioate-inverted abasic deoxyribonucleotide
  source 1..21: mol_type = other RNA
cagtacaggacttcatcagta

SEQ ID NO: 811 - RNA, 21 nt, synthetic construct
  modified_base 1: mod_base = OTHER; note = 5'-6-aminohexyl phosphorothioate-L20-Fab0016-inverted abasic deoxyribonucleotide-phosphorothioate-2'-O-methylcytidine
  modified_base 2: mod_base = cm
  modified_base 3: mod_base = OTHER; note = 2'-O-methyladenosine
  modified_base 4: mod_base = um
  modified_base 5: mod_base = gm
  modified_base 6: mod_base = cm
  modified_base 7: mod_base = OTHER; note = 2'-O-methyladenosine
  modified_base 8: mod_base = OTHER; note = 2'-O-methyladenosine
  modified_base 9: mod_base = OTHER; note = 2'-fluoroguanosine
  modified_base 10: mod_base = OTHER; note = 2'-fluoroadenosine
  modified_base 11: mod_base = OTHER; note = 2'-fluorocytidine
  modified_base 12: mod_base = um
  modified_base 13: mod_base = cm
  modified_base 14: mod_base = OTHER; note = 2'-O-methyladenosine
  modified_base 15: mod_base = cm
  modified_base 16: mod_base = um
  modified_base 17: mod_base = um
  modified_base 18: mod_base = OTHER; note = 2'-O-methyladenosine
  modified_base 19: mod_base = gm
  modified_base 20: mod_base = um
  modified_base 21: mod_base = OTHER; note = 2'-O-methyladenosine-phosphorothioate-inverted abasic deoxyribonucleotide
  source 1..21: mol_type = other RNA
ccatgcaagactcacttagta

SEQ ID NO: 812 - RNA, 21 nt, synthetic construct
  modified_base 1: mod_base = OTHER; note = 5'-6-aminohexyl phosphorothioate-L20-Fab0016-inverted abasic deoxyribonucleotide-phosphorothioate-2'-O-methylcytidine
  modified_base 2: mod_base = um
  modified_base 3: mod_base = gm
  modified_base 4: mod_base = gm
  modified_base 5: mod_base = OTHER; note = 2'-O-methyladenosine
  modified_base 6: mod_base = gm
  modified_base 7: mod_base = cm
  modified_base 8: mod_base = OTHER; note = 2'-O-methyladenosine
  modified_base 9: mod_base = OTHER; note = 2'-fluoroadenosine
  modified_base 10: mod_base = OTHER; note = 2'-fluoroguanosine
  modified_base 11: mod_base = OTHER; note = 2'-fluorouridine
  modified_base 12: mod_base = um
  modified_base 13: mod_base = gm
  modified_base 14: mod_base = OTHER; note = 2'-O-methyladenosine
  modified_base 15: mod_base = OTHER; note = 2'-O-methyladenosine
  modified_base 16: mod_base = um
  modified_base 17: mod_base = gm
  modified_base 18: mod_base = OTHER; note = 2'-O-methyladenosine
  modified_base 19: mod_base = um
  modified_base 20: mod_base = cm
  modified_base 21: mod_base = OTHER; note = um-phosphorothioate-inverted abasic deoxyribonucleotide
  source 1..21: mol_type = other RNA
ctggagcaagttgaatgatct

SEQ ID NO: 813 - RNA, 21 nt, synthetic construct
  modified_base 1: mod_base = OTHER; note = 5'-6-(16-hydroxyhexadecanamido)hexyl phosphorothioate-inverted abasic deoxyribonucleotide-phosphorothioate-2'-O-methylcytidine
  modified_base 2: mod_base = um
  modified_base 3: mod_base = gm
  modified_base 4: mod_base = gm
  modified_base 5: mod_base = OTHER; note = 2'-O-methyladenosine
  modified_base 6: mod_base = gm
  modified_base 7: mod_base = cm
  modified_base 8: mod_base = OTHER; note = 2'-O-methyladenosine
  modified_base 9: mod_base = OTHER; note = 2'-fluoroadenosine
  modified_base 10: mod_base = gm
  modified_base 11: mod_base = OTHER; note = 2'-fluorouridine
  modified_base 12: mod_base = um
  modified_base 13: mod_base = OTHER; note = 2'-fluoroguanosine
  modified_base 14: mod_base = OTHER; note = 2'-O-methyladenosine
  modified_base 15: mod_base = OTHER; note = 2'-O-methyladenosine
  modified_base 16: mod_base = um
  modified_base 17: mod_base = gm
  modified_base 18: mod_base = OTHER; note = 2'-O-methyladenosine
  modified_base 19: mod_base = um
  modified_base 20: mod_base = cm
  modified_base 21: mod_base = OTHER; note = 2'-O-methyladenosine-phosphorothioate-inverted abasic deoxyribonucleotide
  source 1..21: mol_type = other RNA
ctggagcaagttgaatgatca

SEQ ID NO: 814 - RNA, 21 nt, synthetic construct
  modified_base 1: mod_base = OTHER; note = 5'-6-(16-hydroxyhexadecanamido)hexyl phosphorothioate-inverted abasic deoxyribonucleotide-phosphorothioate-2'-O-methylcytidine
  modified_base 2: mod_base = um
  modified_base 3: mod_base = gm
  modified_base 4: mod_base = gm
  modified_base 5: mod_base = OTHER; note = 2'-O-methyladenosine
  modified_base 6: mod_base = gm
  modified_base 7: mod_base = cm
  modified_base 8: mod_base = OTHER; note = 2'-O-methyladenosine
  modified_base 9: mod_base = OTHER; note = 2'-fluoroadenosine
  modified_base 10: mod_base = gm
  modified_base 11: mod_base = OTHER; note = 2'-fluorouridine
  modified_base 12: mod_base = um
  modified_base 13: mod_base = OTHER; note = 2'-fluoroguanosine
  modified_base 14: mod_base = OTHER; note = 2'-O-methyladenosine
  modified_base 15: mod_base = OTHER; note = 2'-O-methyladenosine
  modified_base 16: mod_base = um
  modified_base 17: mod_base = gm
  modified_base 18: mod_base = OTHER; note = 2'-O-methyladenosine
  modified_base 19: mod_base = um
  modified_base 20: mod_base = um
  modified_base 21: mod_base = OTHER; note = 2'-O-methyladenosine-phosphorothioate-inverted abasic deoxyribonucleotide
  source 1..21: mol_type = other RNA
ctggagcaagttgaatgatta

SEQ ID NO: 815 - RNA, 21 nt, synthetic construct
  modified_base 1: mod_base = OTHER; note = 5'-6-(16-hydroxyhexadecanamido)hexyl phosphorothioate-inverted abasic deoxyribonucleotide-phosphorothioate-2'-O-methyladenosine
  modified_base 2: mod_base = gm
  modified_base 3: mod_base = gm
  modified_base 4: mod_base = um
  modified_base 5: mod_base = OTHER; note = 2'-O-methyladenosine
  modified_base 6: mod_base = OTHER; note = 2'-O-methyladenosine
  modified_base 7: mod_base = um
  modified_base 8: mod_base = um
  modified_base 9: mod_base = OTHER; note = 2'-fluorocytidine
  modified_base 10: mod_base = OTHER; note = 2'-O-methyladenosine
  modified_base 11: mod_base = OTHER; note = 2'-fluoroguanosine
  modified_base 12: mod_base = um
  modified_base 13: mod_base = OTHER; note = 2'-fluorocytidine
  modified_base 14: mod_base = um
  modified_base 15: mod_base = cm
  modified_base 16: mod_base = gm
  modified_base 17: mod_base = um
  modified_base 18: mod_base = um
  modified_base 19: mod_base = gm
  modified_base 20: mod_base = um
  modified_base 21: mod_base = OTHER; note = 2'-O-methyladenosine-phosphorothioate-inverted abasic deoxyribonucleotide
  source 1..21: mol_type = other RNA
aggtaattcagtctcgttgta

SEQ ID NO: 816 - RNA, 21 nt, synthetic construct
  modified_base 1: mod_base = OTHER; note = 5'-6-(16-hydroxyhexadecanamido)hexyl phosphorothioate-inverted abasic deoxyribonucleotide-phosphorothioate-2'-O-methylcytidine
  modified_base 2: mod_base = cm
  modified_base 3: mod_base = OTHER; note = 2'-O-methyladenosine
  modified_base 4: mod_base = um
  modified_base 5: mod_base = gm
  modified_base 6: mod_base = cm
  modified_base 7: mod_base = OTHER; note = 2'-O-methyladenosine
  modified_base 8: mod_base = OTHER; note = 2'-O-methyladenosine
  modified_base 9: mod_base = OTHER; note = 2'-fluoroguanosine
  modified_base 10: mod_base = OTHER; note = 2'-O-methyladenosine
  modified_base 11: mod_base = OTHER; note = 2'-fluorocytidine
  modified_base 12: mod_base = OTHER; note = 2'-fluorouridine
  modified_base 13: mod_base = um
  modified_base 14: mod_base = OTHER; note = 2'-O-methyladenosine
  modified_base 15: mod_base = cm
  modified_base 16: mod_base = um
  modified_base 17: mod_base = um
  modified_base 18: mod_base = OTHER; note = 2'-O-methyladenosine
  modified_base 19: mod_base = gm
  modified_base 20: mod_base = um
  modified_base 21: mod_base = OTHER; note = 2'-O-methyladenosine-phosphorothioate-inverted abasic deoxyribonucleotide
  source 1..21: mol_type = other RNA
ccatgcaagacttacttagta

SEQ ID NO: 817 - RNA, 21 nt, synthetic construct
  modified_base 1: mod_base = OTHER; note = 5'-6-aminohexyl phosphorothioate-L20-Fab0070-inverted abasic deoxyribonucleotide-phosphorothioate-2'-O-methyladenosine
  modified_base 2: mod_base = gm
  modified_base 3: mod_base = gm
  modified_base 4: mod_base = cm
  modified_base 5: mod_base = OTHER; note = 2'-O-methyladenosine
  modified_base 6: mod_base = OTHER; note = 2'-O-methyladenosine
  modified_base 7: mod_base = um
  modified_base 8: mod_base = um
  modified_base 9: mod_base = OTHER; note = 2'-fluorocytidine
  modified_base 10: mod_base = OTHER; note = 2'-fluoroadenosine
  modified_base 11: mod_base = OTHER; note = 2'-fluoroguanosine
  modified_base 12: mod_base = um
  modified_base 13: mod_base = cm
  modified_base 14: mod_base = um
  modified_base 15: mod_base = cm
  modified_base 16: mod_base = gm
  modified_base 17: mod_base = um
  modified_base 18: mod_base = um
  modified_base 19: mod_base = gm
  modified_base 20: mod_base = um
  modified_base 21: mod_base = OTHER; note = 2'-O-methyladenosine-phosphorothioate-inverted abasic deoxyribonucleotide
  source 1..21: mol_type = other RNA
aggcaattcagtctcgttgta

SEQ ID NO: 818 - RNA, 21 nt, synthetic construct
  modified_base 1: mod_base = OTHER; note = 5'-6-aminohexyl phosphorothioate-L20-Fab0070-inverted abasic deoxyribonucleotide-phosphorothioate-2'-O-methylcytidine
  modified_base 2: mod_base = um
  modified_base 3: mod_base = gm
  modified_base 4: mod_base = gm
  modified_base 5: mod_base = OTHER; note = 2'-O-methyladenosine
  modified_base 6: mod_base = gm
  modified_base 7: mod_base = cm
  modified_base 8: mod_base = OTHER; note = 2'-O-methyladenosine
  modified_base 9: mod_base = OTHER; note = 2'-fluoroadenosine
  modified_base 10: mod_base = OTHER; note = 2'-fluoroguanosine
  modified_base 11: mod_base = OTHER; note = 2'-fluorouridine
  modified_base 12: mod_base = um
  modified_base 13: mod_base = gm
  modified_base 14: mod_base = OTHER; note = 2'-O-methyladenosine
  modified_base 15: mod_base = OTHER; note = 2'-O-methyladenosine
  modified_base 16: mod_base = um
  modified_base 17: mod_base = gm
  modified_base 18: mod_base = OTHER; note = 2'-O-methyladenosine
  modified_base 19: mod_base = um
  modified_base 20: mod_base = cm
  modified_base 21: mod_base = OTHER; note = um-phosphorothioate-inverted abasic deoxyribonucleotide
  source 1..21: mol_type = other RNA
ctggagcaagttgaatgatct

SEQ ID NO: 819 - RNA, 21 nt, synthetic construct
  modified_base 1: mod_base = OTHER; note = 5'-6-aminohexyl phosphorothioate-L20-Fab0070-inverted abasic deoxyribonucleotide-phosphorothioate-2'-O-methyladenosine
  modified_base 2: mod_base = gm
  modified_base 3: mod_base = gm
  modified_base 4: mod_base = cm
  modified_base 5: mod_base = OTHER; note = 2'-O-methyladenosine
  modified_base 6: mod_base = OTHER; note = 2'-O-methyladenosine
  modified_base 7: mod_base = um
  modified_base 8: mod_base = um
  modified_base 9: mod_base = OTHER; note = 2'-fluorocytidine
  modified_base 10: mod_base = OTHER; note = 2'-O-methyladenosine
  modified_base 11: mod_base = OTHER; note = 2'-fluoroguanosine
  modified_base 12: mod_base = um
  modified_base 13: mod_base = OTHER; note = 2'-fluorocytidine
  modified_base 14: mod_base = um
  modified_base 15: mod_base = cm
  modified_base 16: mod_base = gm
  modified_base 17: mod_base = um
  modified_base 18: mod_base = um
  modified_base 19: mod_base = gm
  modified_base 20: mod_base = um
  modified_base 21: mod_base = OTHER; note = 2'-O-methyladenosine-phosphorothioate-inverted abasic deoxyribonucleotide
  source 1..21: mol_type = other RNA
aggcaattcagtctcgttgta

SEQ ID NO: 820 - RNA, 21 nt, synthetic construct
  modified_base 1: mod_base = OTHER; note = 5'-6-aminohexyl phosphorothioate-L20-Fab0070-inverted abasic deoxyribonucleotide-phosphorothioate-2'-O-methylcytidine
  modified_base 2: mod_base = um
  modified_base 3: mod_base = gm
  modified_base 4: mod_base = gm
  modified_base 5: mod_base = OTHER; note = 2'-O-methyladenosine
  modified_base 6: mod_base = gm
  modified_base 7: mod_base = cm
  modified_base 8: mod_base = OTHER; note = 2'-O-methyladenosine
  modified_base 9: mod_base = OTHER; note = 2'-fluoroadenosine
  modified_base 10: mod_base = gm
  modified_base 11: mod_base = OTHER; note = 2'-fluorouridine
  modified_base 12: mod_base = um
  modified_base 13: mod_base = OTHER; note = 2'-fluoroguanosine
  modified_base 14: mod_base = OTHER; note = 2'-O-methyladenosine
  modified_base 15: mod_base = OTHER; note = 2'-O-methyladenosine
  modified_base 16: mod_base = um
  modified_base 17: mod_base = gm
  modified_base 18: mod_base = OTHER; note = 2'-O-methyladenosine
  modified_base 19: mod_base = um
  modified_base 20: mod_base = cm
  modified_base 21: mod_base = OTHER; note = 2'-O-methyladenosine-phosphorothioate-inverted abasic deoxyribonucleotide
  source 1..21: mol_type = other RNA
ctggagcaagttgaatgatca

SEQ ID NO: 821 - RNA, 21 nt, synthetic construct
  modified_base 1: mod_base = OTHER; note = 5'-6-aminohexyl phosphorothioate-L1026-Fab0070-inverted abasic deoxyribonucleotide-phosphorothioate-2'-O-methyladenosine
  modified_base 2: mod_base = gm
  modified_base 3: mod_base = gm
  modified_base 4: mod_base = cm
  modified_base 5: mod_base = OTHER; note = 2'-O-methyladenosine
  modified_base 6: mod_base = OTHER; note = 2'-O-methyladenosine
  modified_base 7: mod_base = um
  modified_base 8: mod_base = um
  modified_base 9: mod_base = OTHER; note = 2'-fluorocytidine
  modified_base 10: mod_base = OTHER; note = 2'-O-methyladenosine
  modified_base 11: mod_base = OTHER; note = 2'-fluoroguanosine
  modified_base 12: mod_base = um
  modified_base 13: mod_base = OTHER; note = 2'-fluorocytidine
  modified_base 14: mod_base = um
  modified_base 15: mod_base = cm
  modified_base 16: mod_base = gm
  modified_base 17: mod_base = um
  modified_base 18: mod_base = um
  modified_base 19: mod_base = gm
  modified_base 20: mod_base = um
  modified_base 21: mod_base = OTHER; note = 2'-O-methyladenosine-phosphorothioate-inverted abasic deoxyribonucleotide
  source 1..21: mol_type = other RNA
aggcaattcagtctcgttgta

SEQ ID NO: 822 - RNA, 21 nt, synthetic construct
  modified_base 1: mod_base = OTHER; note = 5'-6-aminohexyl phosphorothioate-L1026-Fab0070-inverted abasic deoxyribonucleotide-phosphorothioate-2'-O-methylcytidine
  modified_base 2: mod_base = cm
  modified_base 3: mod_base = OTHER; note = 2'-O-methyladenosine
  modified_base 4: mod_base = um
  modified_base 5: mod_base = gm
  modified_base 6: mod_base = cm
  modified_base 7: mod_base = OTHER; note = 2'-O-methyladenosine
  modified_base 8: mod_base = OTHER; note = 2'-O-methyladenosine
  modified_base 9: mod_base = OTHER; note = 2'-fluoroguanosine
  modified_base 10: mod_base = OTHER; note = 2'-O-methyladenosine
  modified_base 11: mod_base = OTHER; note = 2'-fluorocytidine
  modified_base 12: mod_base = OTHER; note = 2'-fluorouridine
  modified_base 13: mod_base = cm
  modified_base 14: mod_base = OTHER; note = 2'-O-methyladenosine
  modified_base 15: mod_base = cm
  modified_base 16: mod_base = um
  modified_base 17: mod_base = um
  modified_base 18: mod_base = OTHER; note = 2'-O-methyladenosine
  modified_base 19: mod_base = gm
  modified_base 20: mod_base = um
  modified_base 21: mod_base = OTHER; note = 2'-O-methyladenosine-phosphorothioate-inverted abasic deoxyribonucleotide
  source 1..21: mol_type = other RNA
ccatgcaagactcacttagta

SEQ ID NO: 823 - RNA, 21 nt, synthetic construct
  modified_base 1: mod_base = OTHER; note = 5'-6-aminohexyl phosphorothioate-L1026-Fab0070-inverted abasic deoxyribonucleotide-phosphorothioate-2'-O-methylcytidine
  modified_base 2: mod_base = um
  modified_base 3: mod_base = gm
  modified_base 4: mod_base = gm
  modified_base 5: mod_base = OTHER; note = 2'-O-methyladenosine
  modified_base 6: mod_base = gm
  modified_base 7: mod_base = cm
  modified_base 8: mod_base = OTHER; note = 2'-O-methyladenosine
  modified_base 9: mod_base = OTHER; note = 2'-fluoroadenosine
  modified_base 10: mod_base = gm
  modified_base 11: mod_base = OTHER; note = 2'-fluorouridine
  modified_base 12: mod_base = um
  modified_base 13: mod_base = OTHER; note = 2'-fluoroguanosine
  modified_base 14: mod_base = OTHER; note = 2'-O-methyladenosine
  modified_base 15: mod_base = OTHER; note = 2'-O-methyladenosine
  modified_base 16: mod_base = um
  modified_base 17: mod_base = gm
  modified_base 18: mod_base = OTHER; note = 2'-O-methyladenosine
  modified_base 19: mod_base = um
  modified_base 20: mod_base = cm
  modified_base 21: mod_base = OTHER; note = 2'-O-methyladenosine-phosphorothioate-inverted abasic deoxyribonucleotide
  source 1..21: mol_type = other RNA
ctggagcaagttgaatgatca

SEQ ID NO: 824 - RNA, 21 nt, synthetic construct
  modified_base 1: mod_base = OTHER; note = 5'-6-aminohexyl phosphorothioate-L1026-Fab0070-inverted abasic deoxyribonucleotide-phosphorothioate-2'-O-methyladenosine
  modified_base 2: mod_base = gm
  modified_base 3: mod_base = gm
  modified_base 4: mod_base = cm
  modified_base 5: mod_base = OTHER; note = 2'-O-methyladenosine
  modified_base 6: mod_base = OTHER; note = 2'-O-methyladenosine
  modified_base 7: mod_base = um
  modified_base 8: mod_base = um
  modified_base 9: mod_base = OTHER; note = 2'-fluorocytidine
  modified_base 10: mod_base = OTHER; note = 2'-fluoroadenosine
  modified_base 11: mod_base = OTHER; note = 2'-fluoroguanosine
  modified_base 12: mod_base = um
  modified_base 13: mod_base = cm
  modified_base 14: mod_base = um
  modified_base 15: mod_base = cm
  modified_base 16: mod_base = gm
  modified_base 17: mod_base = um
  modified_base 18: mod_base = um
  modified_base 19: mod_base = gm
  modified_base 20: mod_base = um
  modified_base 21: mod_base = OTHER; note = 2'-O-methyladenosine-phosphorothioate-inverted abasic deoxyribonucleotide
  source 1..21: mol_type = other RNA
aggcaattcagtctcgttgta

SEQ ID NO: 825 - RNA, 21 nt, synthetic construct
  modified_base 1: mod_base = OTHER; note = 5'-6-aminohexyl phosphorothioate-L1026-Fab0070-inverted abasic deoxyribonucleotide-phosphorothioate-2'-O-methylcytidine
  modified_base 2: mod_base = um
  modified_base 3: mod_base = gm
  modified_base 4: mod_base = gm
  modified_base 5: mod_base = OTHER; note = 2'-O-methyladenosine
  modified_base 6: mod_base = gm
  modified_base 7: mod_base = cm
  modified_base 8: mod_base = OTHER; note = 2'-O-methyladenosine
  modified_base 9: mod_base = OTHER; note = 2'-fluoroadenosine
  modified_base 10: mod_base = OTHER; note = 2'-fluoroguanosine
  modified_base 11: mod_base = OTHER; note = 2'-fluorouridine
  modified_base 12: mod_base = um
  modified_base 13: mod_base = gm
  modified_base 14: mod_base = OTHER; note = 2'-O-methyladenosine
  modified_base 15: mod_base = OTHER; note = 2'-O-methyladenosine
  modified_base 16: mod_base = um
  modified_base 17: mod_base = gm
  modified_base 18: mod_base = OTHER; note = 2'-O-methyladenosine
  modified_base 19: mod_base = um
  modified_base 20: mod_base = cm
  modified_base 21: mod_base = OTHER; note = um-phosphorothioate-inverted abasic deoxyribonucleotide
  source 1..21: mol_type = other RNA
ctggagcaagttgaatgatct

SEQ ID NO: 826 - RNA, 21 nt, synthetic construct
  modified_base 1: mod_base = OTHER; note = 5'-6-palmitamidohexyl phosphorothioate-inverted abasic deoxyribonucleotide-phosphorothioate-2'-O-methyladenosine
  modified_base 2: mod_base = OTHER; note = 2'-O-methyladenosine
  modified_base 3: mod_base = OTHER; note = 2'-O-methyladenosine
  modified_base 4: mod_base = cm
  modified_base 5: mod_base = OTHER; note = 2'-O-methyladenosine
  modified_base 6: mod_base = gm
  modified_base 7: mod_base = OTHER; note = 2'-O-methyladenosine
  modified_base 8: mod_base = um
  modified_base 9: mod_base = OTHER; note = 2'-fluorocytidine
  modified_base 10: mod_base = OTHER; note = 2'-fluoroadenosine
  modified_base 11: mod_base = OTHER; note = 2'-fluorouridine
  modified_base 12: mod_base = um
  modified_base 13: mod_base = gm
  modified_base 14: mod_base = gm
  modified_base 15: mod_base = OTHER; note = 2'-O-methyladenosine
  modified_base 16: mod_base = OTHER; note = 2'-O-methyladenosine
  modified_base 17: mod_base = um
  modified_base 18: mod_base = um
  modified_base 19: mod_base = cm
  modified_base 20: mod_base = cm
  modified_base 21: mod_base = OTHER; note = um-phosphorothioate-inverted abasic deoxyribonucleotide
  source 1..21: mol_type = other RNA
aaacagatcattggaattcct

SEQ ID NO: 827 - RNA, 21 nt, synthetic construct
  modified_base 1: mod_base = OTHER; note = 5'-6-palmitamidohexyl phosphorothioate-inverted abasic deoxyribonucleotide-phosphorothioate-2'-O-methyluridine
  modified_base 2: mod_base = gm
  modified_base 3: mod_base = um
  modified_base 4: mod_base = gm
  modified_base 5: mod_base = OTHER; note = 2'-O-methyladenosine
  modified_base 6: mod_base = um
  modified_base 7: mod_base = um
  modified_base 8: mod_base = OTHER; note = 2'-O-methyladenosine
  modified_base 9: mod_base = OTHER; note = 2'-fluorouridine
  modified_base 10: mod_base = OTHER; note = 2'-fluoroguanosine
  modified_base 11: mod_base = OTHER; note = 2'-fluorouridine
  modified_base 12: mod_base = cm
  modified_base 13: mod_base = um
  modified_base 14: mod_base = gm
  modified_base 15: mod_base = um
  modified_base 16: mod_base = cm
  modified_base 17: mod_base = OTHER; note = 2'-O-methyladenosine
  modified_base 18: mod_base = gm
  modified_base 19: mod_base = OTHER; note = 2'-O-methyladenosine
  modified_base 20: mod_base = OTHER; note = 2'-O-methyladenosine
  modified_base 21: mod_base = OTHER; note = 2'-O-methyladenosine-phosphorothioate-inverted abasic deoxyribonucleotide
  source 1..21: mol_type = other RNA
tgtgattatgtctgtcagaaa

SEQ ID NO: 828 - RNA, 21 nt, synthetic construct
  modified_base 1: mod_base = OTHER; note = 5'-6-(16-hydroxyhexadecanamido)hexyl phosphorothioate-inverted abasic deoxyribonucleotide-phosphorothioate-2'-O-methyluridine
  modified_base 2: mod_base = gm
  modified_base 3: mod_base = um
  modified_base 4: mod_base = gm
  modified_base 5: mod_base = OTHER; note = 2'-O-methyladenosine
  modified_base 6: mod_base = um
  modified_base 7: mod_base = um
  modified_base 8: mod_base = OTHER; note = 2'-O-methyladenosine
  modified_base 9: mod_base = OTHER; note = 2'-fluorouridine
  modified_base 10: mod_base = OTHER; note = 2'-fluoroguanosine
  modified_base 11: mod_base = OTHER; note = 2'-fluorouridine
  modified_base 12: mod_base = cm
  modified_base 13: mod_base = um
  modified_base 14: mod_base = gm
  modified_base 15: mod_base = um
  modified_base 16: mod_base = cm
  modified_base 17: mod_base = OTHER; note = 2'-O-methyladenosine
  modified_base 18: mod_base = gm
  modified_base 19: mod_base = OTHER; note = 2'-O-methyladenosine
  modified_base 20: mod_base = OTHER; note = 2'-O-methyladenosine
  modified_base 21: mod_base = OTHER; note = 2'-O-methyladenosine-phosphorothioate-inverted abasic deoxyribonucleotide
  source 1..21: mol_type = other RNA
tgtgattatgtctgtcagaaa

SEQ ID NO: 829 - RNA, 21 nt, synthetic construct
  modified_base 1: mod_base = OTHER; note = 5'-6-(16-hydroxyhexadecanamido)hexyl phosphorothioate-inverted abasic deoxyribonucleotide-phosphorothioate-2'-O-methyladenosine
  modified_base 2: mod_base = OTHER; note = 2'-O-methyladenosine
  modified_base 3: mod_base = OTHER; note = 2'-O-methyladenosine
  modified_base 4: mod_base = cm
  modified_base 5: mod_base = OTHER; note = 2'-O-methyladenosine
  modified_base 6: mod_base = gm
  modified_base 7: mod_base = OTHER; note = 2'-O-methyladenosine
  modified_base 8: mod_base = um
  modified_base 9: mod_base = OTHER; note = 2'-fluorocytidine
  modified_base 10: mod_base = OTHER; note = 2'-fluoroadenosine
  modified_base 11: mod_base = OTHER; note = 2'-fluorouridine
  modified_base 12: mod_base = um
  modified_base 13: mod_base = gm
  modified_base 14: mod_base = gm
  modified_base 15: mod_base = OTHER; note = 2'-O-methyladenosine
  modified_base 16: mod_base = OTHER; note = 2'-O-methyladenosine
  modified_base 17: mod_base = um
  modified_base 18: mod_base = um
  modified_base 19: mod_base = cm
  modified_base 20: mod_base = cm
  modified_base 21: mod_base = OTHER; note = um-phosphorothioate-inverted abasic deoxyribonucleotide
  source 1..21: mol_type = other RNA
aaacagatcattggaattcct

SEQ ID NO: 830 - RNA, 21 nt, synthetic construct
  modified_base 1: mod_base = OTHER; note = 5'-6-(16-hydroxyhexadecanamido)hexyl phosphorothioate-inverted abasic deoxyribonucleotide-phosphorothioate-2'-O-methylcytidine
  modified_base 2: mod_base = gm
  modified_base 3: mod_base = cm
  modified_base 4: mod_base = um
  modified_base 5: mod_base = cm
  modified_base 6: mod_base = OTHER; note = 2'-O-methyladenosine
  modified_base 7: mod_base = gm
  modified_base 8: mod_base = gm
  modified_base 9: mod_base = OTHER; note = 2'-fluorouridine
  modified_base 10: mod_base = OTHER; note = 2'-fluorouridine
  modified_base 11: mod_base = OTHER; note = 2'-fluorocytidine
  modified_base 12: mod_base = um
  modified_base 13: mod_base = gm
  modified_base 14: mod_base = cm
  modified_base 15: mod_base = um
  modified_base 16: mod_base = um
  modified_base 17: mod_base = um
  modified_base 18: mod_base = um
  modified_base 19: mod_base = OTHER; note = 2'-O-methyladenosine
  modified_base 20: mod_base = cm
  modified_base 21: mod_base = OTHER; note = 2'-O-methyladenosine-phosphorothioate-inverted abasic deoxyribonucleotide
  source 1..21: mol_type = other RNA
cgctcaggttctgcttttaca

SEQ ID NO: 831 - RNA, 21 nt, synthetic construct
  modified_base 1: mod_base = OTHER; note = 5'-6-(16-hydroxyhexadecanamido)hexyl phosphorothioate-inverted abasic deoxyribonucleotide-phosphorothioate-2'-O-methylguanosine
  modified_base 2: mod_base = OTHER; note = 2'-O-methyladenosine
  modified_base 3: mod_base = cm
  modified_base 4: mod_base = cm
  modified_base 5: mod_base = cm
  modified_base 6: mod_base = um
  modified_base 7: mod_base = gm
  modified_base 8: mod_base = gm
  modified_base 9: mod_base = OTHER; note = 2'-fluoroadenosine
  modified_base 10: mod_base = OTHER; note = 2'-fluoroadenosine
  modified_base 11: mod_base = OTHER; note = 2'-fluoroadenosine
  modified_base 12: mod_base = OTHER; note = 2'-O-methyladenosine
  modified_base 13: mod_base = gm
  modified_base 14: mod_base = cm
  modified_base 15: mod_base = um
  modified_base 16: mod_base = gm
  modified_base 17: mod_base = OTHER; note = 2'-O-methyladenosine
  modified_base 18: mod_base = um
  modified_base 19: mod_base = gm
  modified_base 20: mod_base = OTHER; note = 2'-O-methyladenosine
  modified_base 21: mod_base = OTHER; note = 2'-O-methyladenosine-phosphorothioate-inverted abasic deoxyribonucleotide
  source 1..21: mol_type = other RNA
gaccctggaaaagctgatgaa

SEQ ID NO: 832 - RNA, 21 nt, synthetic construct
  modified_base 1: mod_base = OTHER; note = 5'-6-(16-hydroxyhexadecanamido)hexyl phosphorothioate-inverted abasic deoxyribonucleotide-phosphorothioate-2'-O-methyluridine
  modified_base 2: mod_base = gm
  modified_base 3: mod_base = gm
  modified_base 4: mod_base = OTHER; note = 2'-O-methyladenosine
  modified_base 5: mod_base = OTHER; note = 2'-O-methyladenosine
  modified_base 6: mod_base = OTHER; note = 2'-O-methyladenosine
  modified_base 7: mod_base = OTHER; note = 2'-O-methyladenosine
  modified_base 8: mod_base = gm
  modified_base 9: mod_base = OTHER; note = 2'-fluorocytidine
  modified_base 10: mod_base = OTHER; note = 2'-fluorouridine
  modified_base 11: mod_base = OTHER; note = 2'-fluoroguanosine
  modified_base 12: mod_base = OTHER; note = 2'-O-methyladenosine
  modified_base 13: mod_base = um
  modified_base 14: mod_base = gm
  modified_base 15: mod_base = OTHER; note = 2'-O-methyladenosine
  modified_base 16: mod_base = OTHER; note = 2'-O-methyladenosine
  modified_base 17: mod_base = gm
  modified_base 18: mod_base = gm
  modified_base 19: mod_base = cm
  modified_base 20: mod_base = cm
  modified_base 21: mod_base = OTHER; note = um-phosphorothioate-inverted abasic deoxyribonucleotide
  source 1..21: mol_type = other RNA
tggaaaagctgatgaaggcct

SEQ ID NO: 833 - RNA, 21 nt, synthetic construct
  modified_base 1: mod_base = OTHER; note = 5'-6-(16-hydroxyhexadecanamido)hexyl phosphorothioate-inverted abasic deoxyribonucleotide-phosphorothioate-2'-O-methylcytidine
  modified_base 2: mod_base = um
  modified_base 3: mod_base = gm
  modified_base 4: mod_base = OTHER; note = 2'-O-methyladenosine
  modified_base 5: mod_base = um
  modified_base 6: mod_base = gm
  modified_base 7: mod_base = OTHER; note = 2'-O-methyladenosine
  modified_base 8: mod_base = OTHER; note = 2'-O-methyladenosine
  modified_base 9: mod_base = OTHER; note = 2'-fluoroguanosine
  modified_base 10: mod_base = OTHER; note = 2'-fluoroguanosine
  modified_base 11: mod_base = OTHER; note = 2'-fluorocytidine
  modified_base 12: mod_base = cm
  modified_base 13: mod_base = um
  modified_base 14: mod_base = um
  modified_base 15: mod_base = cm
  modified_base 16: mod_base = gm
  modified_base 17: mod_base = OTHER; note = 2'-O-methyladenosine
  modified_base 18: mod_base = gm
  modified_base 19: mod_base = um
  modified_base 20: mod_base = cm
  modified_base 21: mod_base = OTHER; note = 2'-O-methyladenosine-phosphorothioate-inverted abasic deoxyribonucleotide
  source 1..21: mol_type = other RNA
ctgatgaaggccttcgagtca

SEQ ID NO: 834 - RNA, 21 nt, synthetic construct
  modified_base 1: mod_base = OTHER; note = 5'-6-(16-hydroxyhexadecanamido)hexyl phosphorothioate-inverted abasic deoxyribonucleotide-phosphorothioate-2'-O-methylguanosine
  modified_base 2: mod_base = gm
  modified_base 3: mod_base = cm
  modified_base 4: mod_base = cm
  modified_base 5: mod_base = um
  modified_base 6: mod_base = um
  modified_base 7: mod_base = cm
  modified_base 8: mod_base = gm
  modified_base 9: mod_base = OTHER; note = 2'-fluoroadenosine
  modified_base 10: mod_base = OTHER; note = 2'-fluoroguanosine
  modified_base 11: mod_base = OTHER; note = 2'-fluorouridine
  modified_base 12: mod_base = cm
  modified_base 13: mod_base = cm
  modified_base 14: mod_base = cm
  modified_base 15: mod_base = um
  modified_base 16: mod_base = cm
  modified_base 17: mod_base = OTHER; note = 2'-O-methyladenosine
  modified_base 18: mod_base = OTHER; note = 2'-O-methyladenosine
  modified_base 19: mod_base = gm
  modified_base 20: mod_base = um
  modified_base 21: mod_base = OTHER; note = 2'-O-methyladenosine-phosphorothioate-inverted abasic deoxyribonucleotide
  source 1..21: mol_type = other RNA
ggccttcgagtccctcaagta

SEQ ID NO: 835 - RNA, 21 nt, synthetic construct
  modified_base 1: mod_base = OTHER; note = 5'-6-(16-hydroxyhexadecanamido)hexyl phosphorothioate-inverted abasic deoxyribonucleotide-phosphorothioate-2'-O-methylguanosine
  modified_base 2: mod_base = cm
  modified_base 3: mod_base = cm
  modified_base 4: mod_base = um
  modified_base 5: mod_base = um
  modified_base 6: mod_base = cm
  modified_base 7: mod_base = gm
  modified_base 8: mod_base = OTHER; note = 2'-O-methyladenosine
  modified_base 9: mod_base = OTHER; note = 2'-fluoroguanosine
  modified_base 10: mod_base = OTHER; note = 2'-fluorouridine
  modified_base 11: mod_base = OTHER; note = 2'-fluorocytidine
  modified_base 12: mod_base = cm
  modified_base 13: mod_base = cm
  modified_base 14: mod_base = um
  modified_base 15: mod_base = cm
  modified_base 16: mod_base = OTHER; note = 2'-O-methyladenosine
  modified_base 17: mod_base = OTHER; note = 2'-O-methyladenosine
  modified_base 18: mod_base = gm
  modified_base 19: mod_base = um
  modified_base 20: mod_base = cm
  modified_base 21: mod_base = OTHER; note = 2'-O-methyladenosine-phosphorothioate-inverted abasic deoxyribonucleotide
  source 1..21: mol_type = other RNA
gccttcgagtccctcaagtca

SEQ ID NO: 836 - RNA, 21 nt, synthetic construct
  modified_base 1: mod_base = OTHER; note = 5'-6-(16-hydroxyhexadecanamido)hexyl phosphorothioate-inverted abasic deoxyribonucleotide-phosphorothioate-2'-O-methylcytidine
  modified_base 2: mod_base = OTHER; note = 2'-O-methyladenosine
  modified_base 3: mod_base = um
  modified_base 4: mod_base = cm
  modified_base 5: mod_base = gm
  modified_base 6: mod_base = cm
  modified_base 7: mod_base = um
  modified_base 8: mod_base = OTHER; note = 2'-O-methyladenosine
  modified_base 9: mod_base = OTHER; note = 2'-fluorouridine
  modified_base 10: mod_base = OTHER; note = 2'-fluoroguanosine
  modified_base 11: mod_base = OTHER; note = 2'-fluoroguanosine
  modified_base 12: mod_base = OTHER; note = 2'-O-methyladenosine
  modified_base 13: mod_base = OTHER; note = 2'-O-methyladenosine
  modified_base 14: mod_base = cm
  modified_base 15: mod_base = um
  modified_base 16: mod_base = um
  modified_base 17: mod_base = um
  modified_base 18: mod_base = um
  modified_base 19: mod_base = um
  modified_base 20: mod_base = cm
  modified_base 21: mod_base = OTHER; note = um-phosphorothioate-inverted abasic deoxyribonucleotide
  source 1..21: mol_type = other RNA
catcgctatggaactttttct

SEQ ID NO: 837 - RNA, 21 nt, synthetic construct
  modified_base 1: mod_base = OTHER; note = 5'-6-(16-hydroxyhexadecanamido)hexyl phosphorothioate-inverted abasic deoxyribonucleotide-phosphorothioate-2'-O-methylguanosine
  modified_base 2: mod_base = cm
  modified_base 3: mod_base = um
  modified_base 4: mod_base = um
  modified_base 5: mod_base = um
  modified_base 6: mod_base = gm
  modified_base 7: mod_base = OTHER; note = 2'-O-methyladenosine
  modified_base 8: mod_base = um
  modified_base 9: mod_base = OTHER; note = 2'-fluoroguanosine
  modified_base 10: mod_base = OTHER; note = 2'-fluoroguanosine
  modified_base 11: mod_base = OTHER; note = 2'-fluoroadenosine
  modified_base 12: mod_base = um
  modified_base 13: mod_base = um
  modified_base 14: mod_base = cm
  modified_base 15: mod_base = um
  modified_base 16: mod_base = OTHER; note = 2'-O-methyladenosine
  modified_base 17: mod_base = OTHER; note = 2'-O-methyladenosine
  modified_base 18: mod_base = um
  modified_base 19: mod_base = cm
  modified_base 20: mod_base = um
  modified_base 21: mod_base = OTHER; note = um-phosphorothioate-inverted abasic deoxyribonucleotide
  source 1..21: mol_type = other RNA
gctttgatggattctaatctt

SEQ ID NO: 838 - RNA, 21 nt, synthetic construct
  modified_base 1: mod_base = OTHER; note = 5'-6-(16-hydroxyhexadecanamido)hexyl phosphorothioate-inverted abasic deoxyribonucleotide-phosphorothioate-2'-O-methylguanosine
  modified_base 2: mod_base = OTHER; note = 2'-O-methyladenosine
  modified_base 3: mod_base = um
  modified_base 4: mod_base = gm
  modified_base 5: mod_base = gm
  modified_base 6: mod_base = OTHER; note = 2'-O-methyladenosine
  modified_base 7: mod_base = um
  modified_base 8: mod_base = um
  modified_base 9: mod_base = OTHER; note = 2'-fluorocytidine
  modified_base 10: mod_base = OTHER; note = 2'-fluorouridine
  modified_base 11: mod_base = OTHER; note = 2'-fluoroadenosine
  modified_base 12: mod_base = OTHER; note = 2'-O-methyladenosine
  modified_base 13: mod_base = um
  modified_base 14: mod_base = cm
  modified_base 15: mod_base = um
  modified_base 16: mod_base = um
  modified_base 17: mod_base = cm
  modified_base 18: mod_base = cm
  modified_base 19: mod_base = OTHER; note = 2'-O-methyladenosine
  modified_base 20: mod_base = OTHER; note = 2'-O-methyladenosine
  modified_base 21: mod_base = OTHER; note = 2'-O-methyladenosine-phosphorothioate-inverted abasic deoxyribonucleotide
  source 1..21: mol_type = other RNA
gatggattctaatcttccaaa

SEQ ID NO: 839 - RNA, 21 nt, synthetic construct
  modified_base 1: mod_base = OTHER; note = 5'-6-(16-hydroxyhexadecanamido)hexyl phosphorothioate-inverted abasic deoxyribonucleotide-phosphorothioate-2'-O-methyluridine
  modified_base 2: mod_base = gm
  modified_base 3: mod_base = gm
  modified_base 4: mod_base = cm
  modified_base 5: mod_base = OTHER; note = 2'-O-methyladenosine
  modified_base 6: mod_base = OTHER; note = 2'-O-methyladenosine
  modified_base 7: mod_base = um
  modified_base 8: mod_base = um
  modified_base 9: mod_base = OTHER; note = 2'-fluorouridine
  modified_base 10: mod_base = OTHER; note = 2'-fluorouridine
  modified_base 11: mod_base = OTHER; note = 2'-fluoroguanosine
  modified_base 12: mod_base = cm
  modified_base 13: mod_base = OTHER; note = 2'-O-methyladenosine
  modified_base 14: mod_base = OTHER; note = 2'-O-methyladenosine
  modified_base 15: mod_base = OTHER; note = 2'-O-methyladenosine
  modified_base 16: mod_base = um
  modified_base 17: mod_base = gm
  modified_base 18: mod_base = OTHER; note = 2'-O-methyladenosine
  modified_base 19: mod_base = cm
  modified_base 20: mod_base = OTHER; note = 2'-O-methyladenosine
  modified_base 21: mod_base = OTHER; note = 2'-O-methyladenosine-phosphorothioate-inverted abasic deoxyribonucleotide
  source 1..21: mol_type = other RNA
tggcaattttgcaaatgacaa

SEQ ID NO: 840 - RNA, 21 nt, synthetic construct
  modified_base 1: mod_base = OTHER; note = 5'-6-(16-hydroxyhexadecanamido)hexyl phosphorothioate-inverted abasic deoxyribonucleotide-phosphorothioate-2'-O-methylcytidine
  modified_base 2: mod_base = um
  modified_base 3: mod_base = gm
  modified_base 4: mod_base = OTHER; note = 2'-O-methyladenosine
  modified_base 5: mod_base = cm
  modified_base 6: mod_base = gm
  modified_base 7: mod_base = um
  modified_base 8: mod_base = um
  modified_base 9: mod_base = OTHER; note = 2'-fluoroadenosine
  modified_base 10: mod_base = OTHER; note = 2'-fluorocytidine
  modified_base 11: mod_base = OTHER; note = 2'-fluoroadenosine
  modified_base 12: mod_base = um
  modified_base 13: mod_base = cm
  modified_base 14: mod_base = OTHER; note = 2'-O-methyladenosine
  modified_base 15: mod_base = um
  modified_base 16: mod_base = OTHER; note = 2'-O-methyladenosine
  modified_base 17: mod_base = cm
  modified_base 18: mod_base = OTHER; note = 2'-O-methyladenosine
  modified_base 19: mod_base = cm
  modified_base 20: mod_base = OTHER; note = 2'-O-methyladenosine
  modified_base 21: mod_base = OTHER; note = 2'-O-methyladenosine-phosphorothioate-inverted abasic deoxyribonucleotide
  source 1..21: mol_type = other RNA
ctgacgttacatcatacacaa

SEQ ID NO: 841 - RNA, 21 nt, synthetic construct
  modified_base 1: mod_base = OTHER; note = 5'-6-(16-hydroxyhexadecanamido)hexyl phosphorothioate-inverted abasic deoxyribonucleotide-phosphorothioate-2'-O-methylguanosine
  modified_base 2: mod_base = cm
  modified_base 3: mod_base = OTHER; note = 2'-O-methyladenosine
  modified_base 4: mod_base = cm
  modified_base 5: mod_base = cm
  modified_base 6: mod_base = OTHER; note = 2'-O-methyladenosine
  modified_base 7: mod_base = OTHER; note = 2'-O-methyladenosine
  modified_base 8: mod_base = gm
  modified_base 9: mod_base = OTHER; note = 2'-fluoroadenosine
  modified_base 10: mod_base = OTHER; note = 2'-fluorocytidine
  modified_base 11: mod_base = OTHER; note = 2'-fluorocytidine
  modified_base 12: mod_base = OTHER; note = 2'-O-methyladenosine
  modified_base 13: mod_base = cm
  modified_base 14: mod_base = OTHER; note = 2'-O-methyladenosine
  modified_base 15: mod_base = OTHER; note = 2'-O-methyladenosine
  modified_base 16: mod_base = um
  modified_base 17: mod_base = gm
  modified_base 18: mod_base = um
  modified_base 19: mod_base = um
  modified_base 20: mod_base = gm
  modified_base 21: mod_base = OTHER; note = um-phosphorothioate-inverted abasic deoxyribonucleotide
  source 1..21: mol_type = other RNA
gcaccaagaccacaatgttgt

SEQ ID NO: 842 - RNA, 21 nt, synthetic construct
  modified_base 1: mod_base = OTHER; note = 5'-6-(16-hydroxyhexadecanamido)hexyl phosphorothioate-inverted abasic deoxyribonucleotide-phosphorothioate-2'-O-methylguanosine
  modified_base 2: mod_base = OTHER; note = 2'-O-methyladenosine
  modified_base 3: mod_base = gm
  modified_base 4: mod_base = um
  modified_base 5: mod_base = OTHER; note = 2'-O-methyladenosine
  modified_base 6: mod_base = um
  modified_base 7: mod_base = um
  modified_base 8: mod_base = gm
  modified_base 9: mod_base = OTHER; note = 2'-fluorouridine
  modified_base 10: mod_base = OTHER; note = 2'-fluoroguanosine
  modified_base 11: mod_base = OTHER; note = 2'-fluoroguanosine
  modified_base 12: mod_base = OTHER; note = 2'-O-methyladenosine
  modified_base 13: mod_base = OTHER; note = 2'-O-methyladenosine
  modified_base 14: mod_base = cm
  modified_base 15: mod_base = um
  modified_base 16: mod_base = um
  modified_base 17: mod_base = OTHER; note = 2'-O-methyladenosine
  modified_base 18: mod_base = um
  modified_base 19: mod_base = OTHER; note = 2'-O-methyladenosine
  modified_base 20: mod_base = gm
  modified_base 21: mod_base = OTHER; note = 2'-O-methyladenosine-phosphorothioate-inverted abasic deoxyribonucleotide
  source 1..21: mol_type = other RNA
gagtattgtggaacttataga

SEQ ID NO: 843 - RNA, 21 nt, synthetic construct
  modified_base 1: mod_base = OTHER; note = 5'-6-(16-hydroxyhexadecanamido)hexyl phosphorothioate-inverted abasic deoxyribonucleotide-phosphorothioate-2'-O-methylcytidine
  modified_base 2: mod_base = um
  modified_base 3: mod_base = um
  modified_base 4: mod_base = gm
  modified_base 5: mod_base = OTHER; note = 2'-O-methyladenosine
  modified_base 6: mod_base = OTHER; note = 2'-O-methyladenosine
  modified_base 7: mod_base = cm
  modified_base 8: mod_base = um
  modified_base 9: mod_base = OTHER; note = 2'-fluoroadenosine
  modified_base 10: mod_base = OTHER; note = 2'-fluorocytidine
  modified_base 11: mod_base = OTHER; note = 2'-fluoroadenosine
  modified_base 12: mod_base = um
  modified_base 13: mod_base = cm
  modified_base 14: mod_base = gm
  modified_base 15: mod_base = OTHER; note = 2'-O-methyladenosine
  modified_base 16: mod_base = um
  modified_base 17: mod_base = cm
  modified_base 18: mod_base = OTHER; note = 2'-O-methyladenosine
  modified_base 19: mod_base = um
  modified_base 20: mod_base = gm
  modified_base 21: mod_base = OTHER; note = 2'-O-methyladenosine-phosphorothioate-inverted abasic deoxyribonucleotide
  source 1..21: mol_type = other RNA
cttgaactacatcgatcatga

SEQ ID NO: 844 - RNA, 21 nt, synthetic construct
  modified_base 1: mod_base = OTHER; note = 5'-6-(16-hydroxyhexadecanamido)hexyl phosphorothioate-inverted abasic deoxyribonucleotide-phosphorothioate-2'-O-methyluridine
  modified_base 2: mod_base = gm
  modified_base 3: mod_base = gm
  modified_base 4: mod_base = OTHER; note = 2'-O-methyladenosine
  modified_base 5: mod_base = um
  modified_base 6: mod_base = gm
  modified_base 7: mod_base = cm
  modified_base 8: mod_base = um
  modified_base 9: mod_base = OTHER; note = 2'-fluoroguanosine
  modified_base 10: mod_base = OTHER; note = 2'-fluorouridine
  modified_base 11: mod_base = OTHER; note = 2'-fluoroguanosine
  modified_base 12: mod_base = OTHER; note = 2'-O-methyladenosine
  modified_base 13: mod_base = OTHER; note = 2'-O-methyladenosine
  modified_base 14: mod_base = gm
  modified_base 15: mod_base = cm
  modified_base 16: mod_base = um
  modified_base 17: mod_base = um
  modified_base 18: mod_base = um
  modified_base 19: mod_base = gm
  modified_base 20: mod_base = um
  modified_base 21: mod_base = OTHER; note = 2'-O-methyladenosine-phosphorothioate-inverted abasic deoxyribonucleotide
  source 1..21: mol_type = other RNA
tggatgctgtgaagctttgta

SEQ ID NO: 845 - RNA, 21 nt, synthetic construct
  modified_base 1: mod_base = OTHER; note = 5'-6-(16-hydroxyhexadecanamido)hexyl phosphorothioate-inverted abasic deoxyribonucleotide-phosphorothioate-2'-O-methylcytidine
  modified_base 2: mod_base = OTHER; note = 2'-O-methyladenosine
  modified_base 3: mod_base = gm
  modified_base 4: mod_base = gm
  modified_base 5: mod_base = um
  modified_base 6: mod_base = cm
  modified_base 7: mod_base = cm
  modified_base 8: mod_base = um
  modified_base 9: mod_base = OTHER; note = 2'-fluoroguanosine
  modified_base 10: mod_base = OTHER; note = 2'-fluorouridine
  modified_base 11: mod_base = OTHER; note = 2'-fluorouridine
  modified_base 12: mod_base = OTHER; note = 2'-O-methyladenosine
  modified_base 13: mod_base = cm
  modified_base 14: mod_base = OTHER; note = 2'-O-methyladenosine
  modified_base 15: mod_base = OTHER; note = 2'-O-methyladenosine
  modified_base 16: mod_base = cm
  modified_base 17: mod_base = OTHER; note = 2'-O-methyladenosine
  modified_base 18: mod_base = OTHER; note = 2'-O-methyladenosine
  modified_base 19: mod_base = gm
  modified_base 20: mod_base = um
  modified_base 21: mod_base = OTHER; note = 2'-O-methyladenosine-phosphorothioate-inverted abasic deoxyribonucleotide
  source 1..21: mol_type = other RNA
caggtcctgttacaacaagta

SEQ ID NO: 846 - RNA, 21 nt, synthetic construct
  modified_base 1: mod_base = OTHER; note = 5'-6-(16-hydroxyhexadecanamido)hexyl phosphorothioate-inverted abasic deoxyribonucleotide-phosphorothioate-2'-O-methylcytidine
  modified_base 2: mod_base = OTHER; note = 2'-O-methyladenosine
  modified_base 3: mod_base = OTHER; note = 2'-O-methyladenosine
  modified_base 4: mod_base = cm
  modified_base 5: mod_base = OTHER; note = 2'-O-methyladenosine
  modified_base 6: mod_base = OTHER; note = 2'-O-methyladenosine
  modified_base 7: mod_base = gm
  modified_base 8: mod_base = um
  modified_base 9: mod_base = OTHER; note = 2'-fluoroadenosine
  modified_base 10: mod_base = OTHER; note = 2'-fluoroadenosine
  modified_base 11: mod_base = OTHER; note = 2'-fluoroadenosine
  modified_base 12: mod_base = um
  modified_base 13: mod_base = cm
  modified_base 14: mod_base = cm
  modified_base 15: mod_base = um
  modified_base 16: mod_base = cm
  modified_base 17: mod_base = OTHER; note = 2'-O-methyladenosine
  modified_base 18: mod_base = um
  modified_base 19: mod_base = cm
  modified_base 20: mod_base = OTHER; note = 2'-O-methyladenosine
  modified_base 21: mod_base = OTHER; note = 2'-O-methyladenosine-phosphorothioate-inverted abasic deoxyribonucleotide
  source 1..21: mol_type = other RNA
caacaagtaaatcctcatcaa

SEQ ID NO: 847 - RNA, 21 nt, synthetic construct
  modified_base 1: mod_base = OTHER; note = 5'-6-(16-hydroxyhexadecanamido)hexyl phosphorothioate-inverted abasic deoxyribonucleotide-phosphorothioate-2'-O-methylcytidine
  modified_base 2: mod_base = cm
  modified_base 3: mod_base = OTHER; note = 2'-O-methyladenosine
  modified_base 4: mod_base = OTHER; note = 2'-O-methyladenosine
  modified_base 5: mod_base = um
  modified_base 6: mod_base = gm
  modified_base 7: mod_base = OTHER; note = 2'-O-methyladenosine
  modified_base 8: mod_base = um
  modified_base 9: mod_base = OTHER; note = 2'-fluoroguanosine
  modified_base 10: mod_base = OTHER; note = 2'-fluoroguanosine
  modified_base 11: mod_base = OTHER; note = 2'-fluorocytidine
  modified_base 12: mod_base = OTHER; note = 2'-O-methyladenosine
  modified_base 13: mod_base = OTHER; note = 2'-O-methyladenosine
  modified_base 14: mod_base = cm
  modified_base 15: mod_base = um
  modified_base 16: mod_base = gm
  modified_base 17: mod_base = um
  modified_base 18: mod_base = um
  modified_base 19: mod_base = um
  modified_base 20: mod_base = gm
  modified_base 21: mod_base = OTHER; note = um-phosphorothioate-inverted abasic deoxyribonucleotide
  source 1..21: mol_type = other RNA
ccaatgatggcaactgtttgt

SEQ ID NO: 848 - RNA, 21 nt, synthetic construct
  modified_base 1: mod_base = OTHER; note = 5'-6-(16-hydroxyhexadecanamido)hexyl phosphorothioate-inverted abasic deoxyribonucleotide-phosphorothioate-2'-O-methylcytidine
  modified_base 2: mod_base = OTHER; note = 2'-O-methyladenosine
  modified_base 3: mod_base = gm
  modified_base 4: mod_base = gm
  modified_base 5: mod_base = um
  modified_base 6: mod_base = gm
  modified_base 7: mod_base = um
  modified_base 8: mod_base = um
  modified_base 9: mod_base = OTHER; note = 2'-fluorouridine
  modified_base 10: mod_base = OTHER; note = 2'-fluoroadenosine
  modified_base 11: mod_base = OTHER; note = 2'-fluorouridine
  modified_base 12: mod_base = um
  modified_base 13: mod_base = gm
  modified_base 14: mod_base = gm
  modified_base 15: mod_base = cm
  modified_base 16: mod_base = um
  modified_base 17: mod_base = um
  modified_base 18: mod_base = um
  modified_base 19: mod_base = gm
  modified_base 20: mod_base = um
  modified_base 21: mod_base = OTHER; note = 2'-O-methyladenosine-phosphorothioate-inverted abasic deoxyribonucleotide
  source 1..21: mol_type = other RNA
caggtgtttattggctttgta

SEQ ID NO: 849 - RNA, 21 nt, synthetic construct
  modified_base 1: mod_base = OTHER; note = 5'-6-(16-hydroxyhexadecanamido)hexyl phosphorothioate-inverted abasic deoxyribonucleotide-phosphorothioate-2'-O-methyladenosine
  modified_base 2: mod_base = OTHER; note = 2'-O-methyladenosine
  modified_base 3: mod_base = gm
  modified_base 4: mod_base = cm
  modified_base 5: mod_base = gm
  modified_base 6: mod_base = OTHER; note = 2'-O-methyladenosine
  modified_base 7: mod_base = cm
  modified_base 8: mod_base = um
  modified_base 9: mod_base = OTHER; note = 2'-fluoroguanosine
  modified_base 10: mod_base = OTHER; note = 2'-fluorouridine
  modified_base 11: mod_base = OTHER; note = 2'-fluorocytidine
  modified_base 12: mod_base = um
  modified_base 13: mod_base = cm
  modified_base 14: mod_base = gm
  modified_base 15: mod_base = OTHER; note = 2'-O-methyladenosine
  modified_base 16: mod_base = cm
  modified_base 17: mod_base = OTHER; note = 2'-O-methyladenosine
  modified_base 18: mod_base = gm
  modified_base 19: mod_base = OTHER; note = 2'-O-methyladenosine
  modified_base 20: mod_base = um
  modified_base 21: mod_base = OTHER; note = 2'-O-methyladenosine-phosphorothioate-inverted abasic deoxyribonucleotide
  source 1..21: mol_type = other RNA
aagcgactgtctcgacagata

SEQ ID NO: 850 - RNA, 21 nt, synthetic construct
  modified_base 1: mod_base = OTHER; note = 5'-6-(16-hydroxyhexadecanamido)hexyl phosphorothioate-inverted abasic deoxyribonucleotide-phosphorothioate-2'-O-methyluridine
  modified_base 2: mod_base = cm
  modified_base 3: mod_base = cm
  modified_base 4: mod_base = gm
  modified_base 5: mod_base = um
  modified_base 6: mod_base = gm
  modified_base 7: mod_base = OTHER; note = 2'-O-methyladenosine
  modified_base 8: mod_base = gm
  modified_base 9: mod_base = OTHER; note = 2'-fluorocytidine
  modified_base 10: mod_base = OTHER; note = 2'-fluoroadenosine
  modified_base 11: mod_base = OTHER; note = 2'-fluorocytidine
  modified_base 12: mod_base = um
  modified_base 13: mod_base = gm
  modified_base 14: mod_base = um
  modified_base 15: mod_base = um
  modified_base 16: mod_base = cm
  modified_base 17: mod_base = OTHER; note = 2'-O-methyladenosine
  modified_base 18: mod_base = OTHER; note = 2'-O-methyladenosine
  modified_base 19: mod_base = cm
  modified_base 20: mod_base = um
  modified_base 21: mod_base = OTHER; note = 2'-O-methyladenosine-phosphorothioate-inverted abasic deoxyribonucleotide
  source 1..21: mol_type = other RNA
tccgtgagcactgttcaacta

SEQ ID NO: 851 - RNA, 21 nt, synthetic construct
  modified_base 1: mod_base = OTHER; note = 5'-6-(16-hydroxyhexadecanamido)hexyl phosphorothioate-inverted abasic deoxyribonucleotide-phosphorothioate-2'-O-methylcytidine
  modified_base 2: mod_base = cm
  modified_base 3: mod_base = OTHER; note = 2'-O-methyladenosine
  modified_base 4: mod_base = gm
  modified_base 5: mod_base = cm
  modified_base 6: mod_base = OTHER; note = 2'-O-methyladenosine
  modified_base 7: mod_base = cm
  modified_base 8: mod_base = OTHER; note = 2'-O-methyladenosine
  modified_base 9: mod_base = OTHER; note = 2'-fluoroadenosine
  modified_base 10: mod_base = OTHER; note = 2'-fluoroadenosine
  modified_base 11: mod_base = OTHER; note = 2'-fluoroguanosine
  modified_base 12: mod_base = um
  modified_base 13: mod_base = um
  modified_base 14: mod_base = OTHER; note = 2'-O-methyladenosine
  modified_base 15: mod_base = cm
  modified_base 16: mod_base = um
  modified_base 17: mod_base = um
  modified_base 18: mod_base = OTHER; note = 2'-O-methyladenosine
  modified_base 19: mod_base = gm
  modified_base 20: mod_base = um
  modified_base 21: mod_base = OTHER; note = 2'-O-methyladenosine-phosphorothioate-inverted abasic deoxyribonucleotide
  source 1..21: mol_type = other RNA
ccagcacaaagttacttagta

SEQ ID NO: 852 - RNA, 21 nt, synthetic construct
  modified_base 1: mod_base = OTHER; note = 5'-6-(16-hydroxyhexadecanamido)hexyl phosphorothioate-inverted abasic deoxyribonucleotide-phosphorothioate-2'-O-methylguanosine
  modified_base 2: mod_base = cm
  modified_base 3: mod_base = OTHER; note = 2'-O-methyladenosine
  modified_base 4: mod_base = gm
  modified_base 5: mod_base = cm
  modified_base 6: mod_base = cm
  modified_base 7: mod_base = OTHER; note = 2'-O-methyladenosine
  modified_base 8: mod_base = OTHER; note = 2'-O-methyladenosine
  modified_base 9: mod_base = OTHER; note = 2'-fluoroadenosine
  modified_base 10: mod_base = OTHER; note = 2'-fluorocytidine
  modified_base 11: mod_base = OTHER; note = 2'-fluorouridine
  modified_base 12: mod_base = um
  modified_base 13: mod_base = gm
  modified_base 14: mod_base = gm
  modified_base 15: mod_base = OTHER; note = 2'-O-methyladenosine
  modified_base 16: mod_base = OTHER; note = 2'-O-methyladenosine
  modified_base 17: mod_base = um
  modified_base 18: mod_base = gm
  modified_base 19: mod_base = um
  modified_base 20: mod_base = gm
  modified_base 21: mod_base = OTHER; note = 2'-O-methyladenosine-phosphorothioate-inverted abasic deoxyribonucleotide
  source 1..21: mol_type = other RNA
gcagccaaacttggaatgtga

SEQ ID NO: 853 - RNA, 21 nt, synthetic construct
  modified_base 1: mod_base = OTHER; note = 5'-6-(16-hydroxyhexadecanamido)hexyl phosphorothioate-inverted abasic deoxyribonucleotide-phosphorothioate-2'-O-methylguanosine
  modified_base 2: mod_base = um
  modified_base 3: mod_base = gm
  modified_base 4: mod_base = cm
  modified_base 5: mod_base = OTHER; note = 2'-O-methyladenosine
  modified_base 6: mod_base = OTHER; note = 2'-O-methyladenosine
  modified_base 7: mod_base = um
  modified_base 8: mod_base = OTHER; note = 2'-O-methyladenosine
  modified_base 9: mod_base = OTHER; note = 2'-fluoroguanosine
  modified_base 10: mod_base = OTHER; note = 2'-fluoroadenosine
  modified_base 11: mod_base = OTHER; note = 2'-fluoroguanosine
  modified_base 12: mod_base = OTHER; note = 2'-O-methyladenosine
  modified_base 13: mod_base = OTHER; note = 2'-O-methyladenosine
  modified_base 14: mod_base = OTHER; note = 2'-O-methyladenosine
  modified_base 15: mod_base = um
  modified_base 16: mod_base = OTHER; note = 2'-O-methyladenosine
  modified_base 17: mod_base = gm
  modified_base 18: mod_base = um
  modified_base 19: mod_base = OTHER; note = 2'-O-methyladenosine
  modified_base 20: mod_base = cm
  modified_base 21: mod_base = OTHER; note = 2'-O-methyladenosine-phosphorothioate-inverted abasic deoxyribonucleotide
  source 1..21: mol_type = other RNA
gtgcaatagagaaatagtaca

SEQ ID NO: 854 - RNA, 21 nt, synthetic construct
  modified_base 1: mod_base = OTHER; note = 5'-6-(16-hydroxyhexadecanamido)hexyl phosphorothioate-inverted abasic deoxyribonucleotide-phosphorothioate-2'-O-methylcytidine
  modified_base 2: mod_base = um
  modified_base 3: mod_base = gm
  modified_base 4: mod_base = um
  modified_base 5: mod_base = cm
  modified_base 6: mod_base = OTHER; note = 2'-O-methyladenosine
  modified_base 7: mod_base = gm
  modified_base 8: mod_base = OTHER; note = 2'-O-methyladenosine
  modified_base 9: mod_base = OTHER; note = 2'-fluoroadenosine
  modified_base 10: mod_base = OTHER; note = 2'-fluorocytidine
  modified_base 11: mod_base = OTHER; note = 2'-fluorocytidine
  modified_base 12: mod_base = um
  modified_base 13: mod_base = cm
  modified_base 14: mod_base = cm
  modified_base 15: mod_base = OTHER; note = 2'-O-methyladenosine
  modified_base 16: mod_base = um
  modified_base 17: mod_base = gm
  modified_base 18: mod_base = OTHER; note = 2'-O-methyladenosine
  modified_base 19: mod_base = cm
  modified_base 20: mod_base = um
  modified_base 21: mod_base = OTHER; note = 2'-O-methyladenosine-phosphorothioate-inverted abasic deoxyribonucleotide
  source 1..21: mol_type = other RNA
ctgtcagaacctccatgacta

SEQ ID NO: 855 - RNA, 21 nt, synthetic construct
  modified_base 1: mod_base = OTHER; note = 5'-6-(16-hydroxyhexadecanamido)hexyl phosphorothioate-inverted abasic deoxyribonucleotide-phosphorothioate-2'-O-methylguanosine
  modified_base 2: mod_base = cm
  modified_base 3: mod_base = um
  modified_base 4: mod_base = cm
  modified_base 5: mod_base = OTHER; note = 2'-O-methyladenosine
  modified_base 6: mod_base = um
  modified_base 7: mod_base = um
  modified_base 8: mod_base = gm
  modified_base 9: mod_base = OTHER; note = 2'-fluorouridine
  modified_base 10: mod_base = OTHER; note = 2'-fluoroadenosine
  modified_base 11: mod_base = OTHER; note = 2'-fluoroadenosine
  modified_base 12: mod_base = OTHER; note = 2'-O-methyladenosine
  modified_base 13: mod_base = um
  modified_base 14: mod_base = cm
  modified_base 15: mod_base = OTHER; note = 2'-O-methyladenosine
  modified_base 16: mod_base = cm
  modified_base 17: mod_base = OTHER; note = 2'-O-methyladenosine
  modified_base 18: mod_base = um
  modified_base 19: mod_base = um
  modified_base 20: mod_base = cm
  modified_base 21: mod_base = OTHER; note = 2'-O-methyladenosine-phosphorothioate-inverted abasic deoxyribonucleotide
  source 1..21: mol_type = other RNA
gctcattgtaaatcacattca

SEQ ID NO: 856 - RNA, 21 nt, synthetic construct
  modified_base 1: mod_base = OTHER; note = 5'-6-(16-hydroxyhexadecanamido)hexyl phosphorothioate-inverted abasic deoxyribonucleotide-phosphorothioate-2'-O-methylcytidine
  modified_base 2: mod_base = OTHER; note = 2'-O-methyladenosine
  modified_base 3: mod_base = gm
  modified_base 4: mod_base = um
  modified_base 5: mod_base = OTHER; note = 2'-O-methyladenosine
  modified_base 6: mod_base = cm
  modified_base 7: mod_base = OTHER; note = 2'-O-methyladenosine
  modified_base 8: mod_base = gm
  modified_base 9: mod_base = OTHER; note = 2'-fluoroguanosine
  modified_base 10: mod_base = OTHER; note = 2'-fluoroadenosine
  modified_base 11: mod_base = OTHER; note = 2'-fluorocytidine
  modified_base 12: mod_base = um
  modified_base 13: mod_base = um
  modified_base 14: mod_base = cm
  modified_base 15: mod_base = OTHER; note = 2'-O-methyladenosine
  modified_base 16: mod_base = um
  modified_base 17: mod_base = cm
  modified_base 18: mod_base = OTHER; note = 2'-O-methyladenosine
  modified_base 19: mod_base = gm
  modified_base 20: mod_base = um
  modified_base 21: mod_base = OTHER; note = 2'-O-methyladenosine-phosphorothioate-inverted abasic deoxyribonucleotide
  source 1..21: mol_type = other RNA
cagtacaggacttcatcagta

SEQ ID NO: 857 - RNA, 21 nt, synthetic construct
  modified_base 1: mod_base = OTHER; note = 5'-6-(16-hydroxyhexadecanamido)hexyl phosphorothioate-inverted abasic deoxyribonucleotide-phosphorothioate-2'-O-methyladenosine
  modified_base 2: mod_base = gm
  modified_base 3: mod_base = gm
  modified_base 4: mod_base = cm
  modified_base 5: mod_base = OTHER; note = 2'-O-methyladenosine
  modified_base 6: mod_base = OTHER; note = 2'-O-methyladenosine
  modified_base 7: mod_base = um
  modified_base 8: mod_base = um
  modified_base 9: mod_base = OTHER; note = 2'-fluorocytidine
  modified_base 10: mod_base = OTHER; note = 2'-fluoroadenosine
  modified_base 11: mod_base = OTHER; note = 2'-fluoroguanosine
  modified_base 12: mod_base = um
  modified_base 13: mod_base = cm
  modified_base 14: mod_base = um
  modified_base 15: mod_base = cm
  modified_base 16: mod_base = gm
  modified_base 17: mod_base = um
  modified_base 18: mod_base = um
  modified_base 19: mod_base = gm
  modified_base 20: mod_base = um
  modified_base 21: mod_base = OTHER; note = 2'-O-methyladenosine-phosphorothioate-inverted abasic deoxyribonucleotide
  source 1..21: mol_type = other RNA
aggcaattcagtctcgttgta

SEQ ID NO: 858 - RNA, 21 nt, synthetic construct
  modified_base 1: mod_base = OTHER; note = 5'-6-(16-hydroxyhexadecanamido)hexyl phosphorothioate-inverted abasic deoxyribonucleotide-phosphorothioate-2'-O-methylguanosine
  modified_base 2: mod_base = um
  modified_base 3: mod_base = um
  modified_base 4: mod_base = gm
  modified_base 5: mod_base = cm
  modified_base 6: mod_base = cm
  modified_base 7: mod_base = OTHER; note = 2'-O-methyladenosine
  modified_base 8: mod_base = OTHER; note = 2'-O-methyladenosine
  modified_base 9: mod_base = OTHER; note = 2'-fluorouridine
  modified_base 10: mod_base = OTHER; note = 2'-fluoroguanosine
  modified_base 11: mod_base = OTHER; note = 2'-fluoroguanosine
  modified_base 12: mod_base = OTHER; note = 2'-O-methyladenosine
  modified_base 13: mod_base = OTHER; note = 2'-O-methyladenosine
  modified_base 14: mod_base = gm
  modified_base 15: mod_base = OTHER; note = 2'-O-methyladenosine
  modified_base 16: mod_base = OTHER; note = 2'-O-methyladenosine
  modified_base 17: mod_base = cm
  modified_base 18: mod_base = um
  modified_base 19: mod_base = cm
  modified_base 20: mod_base = OTHER; note = 2'-O-methyladenosine
  modified_base 21: mod_base = OTHER; note = 2'-O-methyladenosine-phosphorothioate-inverted abasic deoxyribonucleotide
  source 1..21: mol_type = other RNA
gttgccaatggaagaactcaa

SEQ ID NO: 859 - RNA, 21 nt, synthetic construct
  modified_base 1: mod_base = OTHER; note = 5'-6-(16-hydroxyhexadecanamido)hexyl phosphorothioate-inverted abasic deoxyribonucleotide-phosphorothioate-2'-O-methylcytidine
  modified_base 2: mod_base = cm
  modified_base 3: mod_base = OTHER; note = 2'-O-methyladenosine
  modified_base 4: mod_base = um
  modified_base 5: mod_base = gm
  modified_base 6: mod_base = cm
  modified_base 7: mod_base = OTHER; note = 2'-O-methyladenosine
  modified_base 8: mod_base = OTHER; note = 2'-O-methyladenosine
  modified_base 9: mod_base = OTHER; note = 2'-fluoroguanosine
  modified_base 10: mod_base = OTHER; note = 2'-fluoroadenosine
  modified_base 11: mod_base = OTHER; note = 2'-fluorocytidine
  modified_base 12: mod_base = um
  modified_base 13: mod_base = cm
  modified_base 14: mod_base = OTHER; note = 2'-O-methyladenosine
  modified_base 15: mod_base = cm
  modified_base 16: mod_base = um
  modified_base 17: mod_base = um
  modified_base 18: mod_base = OTHER; note = 2'-O-methyladenosine
  modified_base 19: mod_base = gm
  modified_base 20: mod_base = um
  modified_base 21: mod_base = OTHER; note = 2'-O-methyladenosine-phosphorothioate-inverted abasic deoxyribonucleotide
  source 1..21: mol_type = other RNA
ccatgcaagactcacttagta

SEQ ID NO: 860 - RNA, 21 nt, synthetic construct
  modified_base 1: mod_base = OTHER; note = 5'-6-(16-hydroxyhexadecanamido)hexyl phosphorothioate-inverted abasic deoxyribonucleotide-phosphorothioate-2'-O-methyladenosine
  modified_base 2: mod_base = gm
  modified_base 3: mod_base = gm
  modified_base 4: mod_base = gm
  modified_base 5: mod_base = OTHER; note = 2'-O-methyladenosine
  modified_base 6: mod_base = um
  modified_base 7: mod_base = gm
  modified_base 8: mod_base = OTHER; note = 2'-O-methyladenosine
  modified_base 9: mod_base = OTHER; note = 2'-fluoroguanosine
  modified_base 10: mod_base = OTHER; note = 2'-fluorouridine
  modified_base 11: mod_base = OTHER; note = 2'-fluoroguanosine
  modified_base 12: mod_base = OTHER; note = 2'-O-methyladenosine
  modified_base 13: mod_base = OTHER; note = 2'-O-methyladenosine
  modified_base 14: mod_base = OTHER; note = 2'-O-methyladenosine
  modified_base 15: mod_base = um
  modified_base 16: mod_base = um
  modified_base 17: mod_base = um
  modified_base 18: mod_base = cm
  modified_base 19: mod_base = um
  modified_base 20: mod_base = gm
  modified_base 21: mod_base = OTHER; note = 2'-O-methyladenosine-phosphorothioate-inverted abasic deoxyribonucleotide
  source 1..21: mol_type = other RNA
agggatgagtgaaatttctga

SEQ ID NO: 861 - RNA, 21 nt, synthetic construct
  modified_base 1: mod_base = OTHER; note = 5'-6-(16-hydroxyhexadecanamido)hexyl phosphorothioate-inverted abasic deoxyribonucleotide-phosphorothioate-2'-O-methylcytidine
  modified_base 2: mod_base = um
  modified_base 3: mod_base = gm
  modified_base 4: mod_base = gm
  modified_base 5: mod_base = OTHER; note = 2'-O-methyladenosine
  modified_base 6: mod_base = gm
  modified_base 7: mod_base = cm
  modified_base 8: mod_base = OTHER; note = 2'-O-methyladenosine
  modified_base 9: mod_base = OTHER; note = 2'-fluoroadenosine
  modified_base 10: mod_base = OTHER; note = 2'-fluoroguanosine
  modified_base 11: mod_base = OTHER; note = 2'-fluorouridine
  modified_base 12: mod_base = um
  modified_base 13: mod_base = gm
  modified_base 14: mod_base = OTHER; note = 2'-O-methyladenosine
  modified_base 15: mod_base = OTHER; note = 2'-O-methyladenosine
  modified_base 16: mod_base = um
  modified_base 17: mod_base = gm
  modified_base 18: mod_base = OTHER; note = 2'-O-methyladenosine
  modified_base 19: mod_base = um
  modified_base 20: mod_base = cm
  modified_base 21: mod_base = OTHER; note = um-phosphorothioate-inverted abasic deoxyribonucleotide
  source 1..21: mol_type = other RNA
ctggagcaagttgaatgatct

SEQ ID NO: 862 - RNA, 21 nt, synthetic construct
  modified_base 1: mod_base = OTHER; note = 5'-6-(16-hydroxyhexadecanamido)hexyl phosphorothioate-inverted abasic deoxyribonucleotide-phosphorothioate-2'-O-methylcytidine
  modified_base 2: mod_base = gm
  modified_base 3: mod_base = OTHER; note = 2'-O-methyladenosine
  modified_base 4: mod_base = cm
  modified_base 5: mod_base = cm
  modified_base 6: mod_base = cm
  modified_base 7: mod_base = um
  modified_base 8: mod_base = gm
  modified_base 9: mod_base = OTHER; note = 2'-fluoroguanosine
  modified_base 10: mod_base = OTHER; note = 2'-fluoroadenosine
  modified_base 11: mod_base = OTHER; note = 2'-fluoroadenosine
  modified_base 12: mod_base = OTHER; note = 2'-O-methyladenosine
  modified_base 13: mod_base = OTHER; note = 2'-O-methyladenosine
  modified_base 14: mod_base = gm
  modified_base 15: mod_base = cm
  modified_base 16: mod_base = um
  modified_base 17: mod_base = OTHER; note = 2'-O-methylinosine
  modified_base 18: mod_base = OTHER; note = 2'-O-methyladenosine
  modified_base 19: mod_base = um
  modified_base 20: mod_base = gm
  modified_base 21: mod_base = OTHER; note = 2'-O-methyladenosine-phosphorothioate-inverted abasic deoxyribonucleotide
  source 1..21: mol_type = other RNA
cgaccctggaaaagctnatga

SEQ ID NO: 863 - RNA, 21 nt, synthetic construct
  modified_base 1: mod_base = OTHER; note = 5'-6-(16-hydroxyhexadecanamido)hexyl phosphorothioate-inverted abasic deoxyribonucleotide-phosphorothioate-2'-O-methylguanosine
  modified_base 2: mod_base = cm
  modified_base 3: mod_base = um
  modified_base 4: mod_base = gm
  modified_base 5: mod_base = OTHER; note = 2'-O-methyladenosine
  modified_base 6: mod_base = um
  modified_base 7: mod_base = gm
  modified_base 8: mod_base = OTHER; note = 2'-O-methyladenosine
  modified_base 9: mod_base = OTHER; note = 2'-fluoroadenosine
  modified_base 10: mod_base = OTHER; note = 2'-fluoroguanosine
  modified_base 11: mod_base = OTHER; note = 2'-fluoroguanosine
  modified_base 12: mod_base = cm
  modified_base 13: mod_base = cm
  modified_base 14: mod_base = um
  modified_base 15: mod_base = um
  modified_base 16: mod_base = cm
  modified_base 17: mod_base = OTHER; note = 2'-O-methylinosine
  modified_base 18: mod_base = OTHER; note = 2'-O-methyladenosine
  modified_base 19: mod_base = gm
  modified_base 20: mod_base = um
  modified_base 21: mod_base = OTHER; note = 2'-O-methyladenosine-phosphorothioate-inverted abasic deoxyribonucleotide
  source 1..21: mol_type = other RNA
gctgatgaaggccttcnagta

SEQ ID NO: 864 - RNA, 21 nt, synthetic construct
  modified_base 1: mod_base = OTHER; note = 5'-6-(16-hydroxyhexadecanamido)hexyl phosphorothioate-inverted abasic deoxyribonucleotide-phosphorothioate-2'-O-methylcytidine
  modified_base 2: mod_base = gm
  modified_base 3: mod_base = cm
  modified_base 4: mod_base = um
  modified_base 5: mod_base = gm
  modified_base 6: mod_base = cm
  modified_base 7: mod_base = OTHER; note = 2'-O-methyladenosine
  modified_base 8: mod_base = cm
  modified_base 9: mod_base = OTHER; note = 2'-fluorocytidine
  modified_base 10: mod_base = OTHER; note = 2'-fluoroguanosine
  modified_base 11: mod_base = OTHER; note = 2'-fluoroadenosine
  modified_base 12: mod_base = cm
  modified_base 13: mod_base = cm
  modified_base 14: mod_base = OTHER; note = 2'-O-methyladenosine
  modified_base 15: mod_base = OTHER; note = 2'-O-methyladenosine
  modified_base 16: mod_base = OTHER; note = 2'-O-methyladenosine
  modified_base 17: mod_base = gm
  modified_base 18: mod_base = OTHER; note = 2'-O-methyladenosine
  modified_base 19: mod_base = OTHER; note = 2'-O-methyladenosine
  modified_base 20: mod_base = OTHER; note = 2'-O-methyladenosine
  modified_base 21: mod_base = OTHER; note = 2'-O-methyladenosine-phosphorothioate-inverted abasic deoxyribonucleotide
  source 1..21: mol_type = other RNA
cgctgcaccgaccaaagaaaa

SEQ ID NO: 865 - RNA, 21 nt, synthetic construct
  modified_base 1: mod_base = OTHER; note = 5'-6-(16-hydroxyhexadecanamido)hexyl phosphorothioate-inverted abasic deoxyribonucleotide-phosphorothioate-2'-O-methylguanosine
  modified_base 2: mod_base = cm
  modified_base 3: mod_base = um
  modified_base 4: mod_base = gm
  modified_base 5: mod_base = cm
  modified_base 6: mod_base = OTHER; note = 2'-O-methyladenosine
  modified_base 7: mod_base = cm
  modified_base 8: mod_base = cm
  modified_base 9: mod_base = OTHER; note = 2'-fluoroguanosine
  modified_base 10: mod_base = OTHER; note = 2'-fluoroadenosine
  modified_base 11: mod_base = OTHER; note = 2'-fluorocytidine
  modified_base 12: mod_base = cm
  modified_base 13: mod_base = OTHER; note = 2'-O-methyladenosine
  modified_base 14: mod_base = OTHER; note = 2'-O-methyladenosine
  modified_base 15: mod_base = OTHER; note = 2'-O-methyladenosine
  modified_base 16: mod_base = gm
  modified_base 17: mod_base = OTHER; note = 2'-O-methyladenosine
  modified_base 18: mod_base = OTHER; note = 2'-O-methyladenosine
  modified_base 19: mod_base = OTHER; note = 2'-O-methyladenosine
  modified_base 20: mod_base = gm
  modified_base 21: mod_base = OTHER; note = 2'-O-methyladenosine-phosphorothioate-inverted abasic deoxyribonucleotide
  source 1..21: mol_type = other RNA
gctgcaccgaccaaagaaaga

SEQ ID NO: 866 - RNA, 21 nt, synthetic construct
  modified_base 1: mod_base = OTHER; note = 5'-6-(16-hydroxyhexadecanamido)hexyl phosphorothioate-inverted abasic deoxyribonucleotide-phosphorothioate-2'-O-methylcytidine
  modified_base 2: mod_base = um
  modified_base 3: mod_base = gm
  modified_base 4: mod_base = cm
  modified_base 5: mod_base = OTHER; note = 2'-O-methyladenosine
  modified_base 6: mod_base = cm
  modified_base 7: mod_base = cm
  modified_base 8: mod_base = gm
  modified_base 9: mod_base = OTHER; note = 2'-fluoroadenosine
  modified_base 10: mod_base = OTHER; note = 2'-fluorocytidine
  modified_base 11: mod_base = OTHER; note = 2'-fluorocytidine
  modified_base 12: mod_base = OTHER; note = 2'-O-methyladenosine
  modified_base 13: mod_base = OTHER; note = 2'-O-methyladenosine
  modified_base 14: mod_base = OTHER; note = 2'-O-methyladenosine
  modified_base 15: mod_base = gm
  modified_base 16: mod_base = OTHER; note = 2'-O-methyladenosine
  modified_base 17: mod_base = OTHER; note = 2'-O-methyladenosine
  modified_base 18: mod_base = OTHER; note = 2'-O-methyladenosine
  modified_base 19: mod_base = gm
  modified_base 20: mod_base = OTHER; note = 2'-O-methyladenosine
  modified_base 21: mod_base = OTHER; note = 2'-O-methyladenosine-phosphorothioate-inverted abasic deoxyribonucleotide
  source 1..21: mol_type = other RNA
ctgcaccgaccaaagaaagaa

SEQ ID NO: 867 - RNA, 21 nt, synthetic construct
  modified_base 1: mod_base = OTHER; note = 5'-6-(16-hydroxyhexadecanamido)hexyl phosphorothioate-inverted abasic deoxyribonucleotide-phosphorothioate-2'-O-methylcytidine
  modified_base 2: mod_base = um
  modified_base 3: mod_base = gm
  modified_base 4: mod_base = OTHER; note = 2'-O-methyladenosine
  modified_base 5: mod_base = um
  modified_base 6: mod_base = gm
  modified_base 7: mod_base = OTHER; note = 2'-O-methyladenosine
  modified_base 8: mod_base = OTHER; note = 2'-O-methyladenosine
  modified_base 9: mod_base = OTHER; note = 2'-fluoroguanosine
  modified_base 10: mod_base = gm
  modified_base 11: mod_base = OTHER; note = 2'-fluorocytidine
  modified_base 12: mod_base = cm
  modified_base 13: mod_base = um
  modified_base 14: mod_base = um
  modified_base 15: mod_base = cm
  modified_base 16: mod_base = gm
  modified_base 17: mod_base = OTHER; note = 2'-O-methyladenosine
  modified_base 18: mod_base = gm
  modified_base 19: mod_base = um
  modified_base 20: mod_base = cm
  modified_base 21: mod_base = OTHER; note = 2'-O-methyladenosine-phosphorothioate-inverted abasic deoxyribonucleotide
  source 1..21: mol_type = other RNA
ctgatgaaggccttcgagtca

SEQ ID NO: 868 - RNA, 21 nt, synthetic construct
  modified_base 1: mod_base = OTHER; note = 5'-6-(16-hydroxyhexadecanamido)hexyl phosphorothioate-inverted abasic deoxyribonucleotide-phosphorothioate-2'-O-methylcytidine
  modified_base 2: mod_base = um
  modified_base 3: mod_base = gm
  modified_base 4: mod_base = OTHER; note = 2'-O-methyladenosine
  modified_base 5: mod_base = um
  modified_base 6: mod_base = gm
  modified_base 7: mod_base = OTHER; note = 2'-fluoroadenosine
  modified_base 8: mod_base = OTHER; note = 2'-O-methyladenosine
  modified_base 9: mod_base = OTHER; note = 2'-fluoroguanosine
  modified_base 10: mod_base = gm
  modified_base 11: mod_base = OTHER; note = 2'-fluorocytidine
  modified_base 12: mod_base = cm
  modified_base 13: mod_base = um
  modified_base 14: mod_base = um
  modified_base 15: mod_base = cm
  modified_base 16: mod_base = gm
  modified_base 17: mod_base = OTHER; note = 2'-O-methyladenosine
  modified_base 18: mod_base = gm
  modified_base 19: mod_base = um
  modified_base 20: mod_base = cm
  modified_base 21: mod_base = OTHER; note = 2'-O-methyladenosine-phosphorothioate-inverted abasic deoxyribonucleotide
  source 1..21: mol_type = other RNA
ctgatgaaggccttcgagtca

SEQ ID NO: 869 - RNA, 21 nt, synthetic construct
  modified_base 1: mod_base = OTHER; note = 5'-6-(16-hydroxyhexadecanamido)hexyl phosphorothioate-inverted abasic deoxyribonucleotide-phosphorothioate-2'-O-methylcytidine
  modified_base 2: mod_base = um
  modified_base 3: mod_base = gm
  modified_base 4: mod_base = OTHER; note = 2'-O-methyladenosine
  modified_base 5: mod_base = um
  modified_base 6: mod_base = gm
  modified_base 7: mod_base = OTHER; note = 2'-O-methyladenosine
  modified_base 8: mod_base = OTHER; note = 2'-O-methyladenosine
  modified_base 9: mod_base = OTHER; note = 2'-fluoroguanosine
  modified_base 10: mod_base = gm
  modified_base 11: mod_base = OTHER; note = 2'-fluorocytidine
  modified_base 12: mod_base = OTHER; note = 2'-fluorocytidine
  modified_base 13: mod_base = um
  modified_base 14: mod_base = um
  modified_base 15: mod_base = cm
  modified_base 16: mod_base = gm
  modified_base 17: mod_base = OTHER; note = 2'-O-methyladenosine
  modified_base 18: mod_base = gm
  modified_base 19: mod_base = um
  modified_base 20: mod_base = cm
  modified_base 21: mod_base = OTHER; note = 2'-O-methyladenosine-phosphorothioate-inverted abasic deoxyribonucleotide
  source 1..21: mol_type = other RNA
ctgatgaaggccttcgagtca

SEQ ID NO: 870 - RNA, 21 nt, synthetic construct
  modified_base 1: mod_base = OTHER; note = 5'-6-(16-hydroxyhexadecanamido)hexyl phosphorothioate-inverted abasic deoxyribonucleotide-phosphorothioate-2'-O-methylcytidine
  modified_base 2: mod_base = um
  modified_base 3: mod_base = um
  modified_base 4: mod_base = gm
  modified_base 5: mod_base = OTHER; note = 2'-O-methyladenosine
  modified_base 6: mod_base = OTHER; note = 2'-O-methyladenosine
  modified_base 7: mod_base = cm
  modified_base 8: mod_base = um
  modified_base 9: mod_base = OTHER; note = 2'-fluoroadenosine
  modified_base 10: mod_base = cm
  modified_base 11: mod_base = OTHER; note = 2'-fluoroadenosine
  modified_base 12: mod_base = um
  modified_base 13: mod_base = cm
  modified_base 14: mod_base = gm
  modified_base 15: mod_base = OTHER; note = 2'-O-methyladenosine
  modified_base 16: mod_base = um
  modified_base 17: mod_base = cm
  modified_base 18: mod_base = OTHER; note = 2'-O-methyladenosine
  modified_base 19: mod_base = um
  modified_base 20: mod_base = gm
  modified_base 21: mod_base = OTHER; note = 2'-O-methyladenosine-phosphorothioate-inverted abasic deoxyribonucleotide
  source 1..21: mol_type = other RNA
cttgaactacatcgatcatga

SEQ ID NO: 871 - RNA, 21 nt, synthetic construct
  modified_base 1: mod_base = OTHER; note = 5'-6-(16-hydroxyhexadecanamido)hexyl phosphorothioate-inverted abasic deoxyribonucleotide-phosphorothioate-2'-O-methylcytidine
  modified_base 2: mod_base = um
  modified_base 3: mod_base = um
  modified_base 4: mod_base = gm
  modified_base 5: mod_base = OTHER; note = 2'-O-methyladenosine
  modified_base 6: mod_base = OTHER; note = 2'-O-methyladenosine
  modified_base 7: mod_base = OTHER; note = 2'-fluorocytidine
  modified_base 8: mod_base = um
  modified_base 9: mod_base = OTHER; note = 2'-fluoroadenosine
  modified_base 10: mod_base = cm
  modified_base 11: mod_base = OTHER; note = 2'-fluoroadenosine
  modified_base 12: mod_base = um
  modified_base 13: mod_base = cm
  modified_base 14: mod_base = gm
  modified_base 15: mod_base = OTHER; note = 2'-O-methyladenosine
  modified_base 16: mod_base = um
  modified_base 17: mod_base = cm
  modified_base 18: mod_base = OTHER; note = 2'-O-methyladenosine
  modified_base 19: mod_base = um
  modified_base 20: mod_base = gm
  modified_base 21: mod_base = OTHER; note = 2'-O-methyladenosine-phosphorothioate-inverted abasic deoxyribonucleotide
  source 1..21: mol_type = other RNA
cttgaactacatcgatcatga

SEQ ID NO: 872 - RNA, 21 nt, synthetic construct
  modified_base 1: mod_base = OTHER; note = 5'-6-(16-hydroxyhexadecanamido)hexyl phosphorothioate-inverted abasic deoxyribonucleotide-phosphorothioate-2'-O-methylcytidine
  modified_base 2: mod_base = um
  modified_base 3: mod_base = um
  modified_base 4: mod_base = gm
  modified_base 5: mod_base = OTHER; note = 2'-O-methyladenosine
  modified_base 6: mod_base = OTHER; note = 2'-O-methyladenosine
  modified_base 7: mod_base = cm
  modified_base 8: mod_base = um
  modified_base 9: mod_base = OTHER; note = 2'-fluoroadenosine
  modified_base 10: mod_base = cm
  modified_base 11: mod_base = OTHER; note = 2'-fluoroadenosine
  modified_base 12: mod_base = OTHER; note = 2'-fluorouridine
  modified_base 13: mod_base = cm
  modified_base 14: mod_base = gm
  modified_base 15: mod_base = OTHER; note = 2'-O-methyladenosine
  modified_base 16: mod_base = um
  modified_base 17: mod_base = cm
  modified_base 18: mod_base = OTHER; note = 2'-O-methyladenosine
  modified_base 19: mod_base = um
  modified_base 20: mod_base = gm
  modified_base 21: mod_base = OTHER; note = 2'-O-methyladenosine-phosphorothioate-inverted abasic deoxyribonucleotide
  source 1..21: mol_type = other RNA
cttgaactacatcgatcatga

SEQ ID NO: 873 - RNA, 21 nt, synthetic construct
  modified_base 1: mod_base = OTHER; note = 5'-6-(16-hydroxyhexadecanamido)hexyl phosphorothioate-inverted abasic deoxyribonucleotide-phosphorothioate-2'-O-methylcytidine
  modified_base 2: mod_base = um
  modified_base 3: mod_base = gm
  modified_base 4: mod_base = OTHER; note = 2'-O-methyladenosine
  modified_base 5: mod_base = cm
  modified_base 6: mod_base = gm
  modified_base 7: mod_base = um
  modified_base 8: mod_base = um
  modified_base 9: mod_base = OTHER; note = 2'-fluoroadenosine
  modified_base 10: mod_base = cm
  modified_base 11: mod_base = OTHER; note = 2'-fluoroadenosine
  modified_base 12: mod_base = um
  modified_base 13: mod_base = cm
  modified_base 14: mod_base = OTHER; note = 2'-O-methyladenosine
  modified_base 15: mod_base = um
  modified_base 16: mod_base = OTHER; note = 2'-O-methyladenosine
  modified_base 17: mod_base = cm
  modified_base 18: mod_base = OTHER; note = 2'-O-methyladenosine
  modified_base 19: mod_base = cm
  modified_base 20: mod_base = OTHER; note = 2'-O-methyladenosine
  modified_base 21: mod_base = OTHER; note = 2'-O-methyladenosine-phosphorothioate-inverted abasic deoxyribonucleotide
  source 1..21: mol_type = other RNA
ctgacgttacatcatacacaa

SEQ ID NO: 874 - RNA, 21 nt, synthetic construct
  modified_base 1: mod_base = OTHER; note = 5'-6-(16-hydroxyhexadecanamido)hexyl phosphorothioate-inverted abasic deoxyribonucleotide-phosphorothioate-2'-O-methylcytidine
  modified_base 2: mod_base = um
  modified_base 3: mod_base = gm
  modified_base 4: mod_base = OTHER; note = 2'-O-methyladenosine
  modified_base 5: mod_base = cm
  modified_base 6: mod_base = gm
  modified_base 7: mod_base = OTHER; note = 2'-fluorouridine
  modified_base 8: mod_base = um
  modified_base 9: mod_base = OTHER; note = 2'-fluoroadenosine
  modified_base 10: mod_base = cm
  modified_base 11: mod_base = OTHER; note = 2'-fluoroadenosine
  modified_base 12: mod_base = um
  modified_base 13: mod_base = cm
  modified_base 14: mod_base = OTHER; note = 2'-O-methyladenosine
  modified_base 15: mod_base = um
  modified_base 16: mod_base = OTHER; note = 2'-O-methyladenosine
  modified_base 17: mod_base = cm
  modified_base 18: mod_base = OTHER; note = 2'-O-methyladenosine
  modified_base 19: mod_base = cm
  modified_base 20: mod_base = OTHER; note = 2'-O-methyladenosine
  modified_base 21: mod_base = OTHER; note = 2'-O-methyladenosine-phosphorothioate-inverted abasic deoxyribonucleotide
  source 1..21: mol_type = other RNA
ctgacgttacatcatacacaa

SEQ ID NO: 875 - RNA, 21 nt, synthetic construct
  modified_base 1: mod_base = OTHER; note = 5'-6-(16-hydroxyhexadecanamido)hexyl phosphorothioate-inverted abasic deoxyribonucleotide-phosphorothioate-2'-O-methylcytidine
  modified_base 2: mod_base = um
  modified_base 3: mod_base = gm
  modified_base 4: mod_base = OTHER; note = 2'-O-methyladenosine
  modified_base 5: mod_base = cm
  modified_base 6: mod_base = gm
  modified_base 7: mod_base = um
  modified_base 8: mod_base = um
  modified_base 9: mod_base = OTHER; note = 2'-fluoroadenosine
  modified_base 10: mod_base = cm
  modified_base 11: mod_base = OTHER; note = 2'-fluoroadenosine
  modified_base 12: mod_base = OTHER; note = 2'-fluorouridine
  modified_base 13: mod_base = cm
  modified_base 14: mod_base = OTHER; note = 2'-O-methyladenosine
  modified_base 15: mod_base = um
  modified_base 16: mod_base = OTHER; note = 2'-O-methyladenosine
  modified_base 17: mod_base = cm
  modified_base 18: mod_base = OTHER; note = 2'-O-methyladenosine
  modified_base 19: mod_base = cm
  modified_base 20: mod_base = OTHER; note = 2'-O-methyladenosine
  modified_base 21: mod_base = OTHER; note = 2'-O-methyladenosine-phosphorothioate-inverted abasic deoxyribonucleotide
  source 1..21: mol_type = other RNA
ctgacgttacatcatacacaa

SEQ ID NO: 876 - RNA, 21 nt, synthetic construct
  modified_base 1: mod_base = OTHER; note = 5'-6-(16-hydroxyhexadecanamido)hexyl phosphorothioate-inverted abasic deoxyribonucleotide-phosphorothioate-2'-O-methylcytidine
  modified_base 2: mod_base = OTHER; note = 2'-O-methyladenosine
  modified_base 3: mod_base = gm
  modified_base 4: mod_base = gm
  modified_base 5: mod_base = um
  modified_base 6: mod_base = gm
  modified_base 7: mod_base = um
  modified_base 8: mod_base = um
  modified_base 9: mod_base = OTHER; note = 2'-fluorouridine
  modified_base 10: mod_base = OTHER; note = 2'-O-methyladenosine
  modified_base 11: mod_base = OTHER; note = 2'-fluorouridine
  modified_base 12: mod_base = um
  modified_base 13: mod_base = gm
  modified_base 14: mod_base = gm
  modified_base 15: mod_base = cm
  modified_base 16: mod_base = um
  modified_base 17: mod_base = um
  modified_base 18: mod_base = um
  modified_base 19: mod_base = gm
  modified_base 20: mod_base = um
  modified_base 21: mod_base = OTHER; note = 2'-O-methyladenosine-phosphorothioate-inverted abasic deoxyribonucleotide
  source 1..21: mol_type = other RNA
caggtgtttattggctttgta

SEQ ID NO: 877 - RNA, 21 nt, synthetic construct
  modified_base 1: mod_base = OTHER; note = 5'-6-(16-hydroxyhexadecanamido)hexyl phosphorothioate-inverted abasic deoxyribonucleotide-phosphorothioate-2'-O-methylcytidine
  modified_base 2: mod_base = OTHER; note = 2'-O-methyladenosine
  modified_base 3: mod_base = gm
  modified_base 4: mod_base = gm
  modified_base 5: mod_base = um
  modified_base 6: mod_base = gm
  modified_base 7: mod_base = OTHER; note = 2'-fluorouridine
  modified_base 8: mod_base = um
  modified_base 9: mod_base = OTHER; note = 2'-fluorouridine
  modified_base 10: mod_base = OTHER; note = 2'-O-methyladenosine
  modified_base 11: mod_base = OTHER; note = 2'-fluorouridine
  modified_base 12: mod_base = um
  modified_base 13: mod_base = gm
  modified_base 14: mod_base = gm
  modified_base 15: mod_base = cm
  modified_base 16: mod_base = um
  modified_base 17: mod_base = um
  modified_base 18: mod_base = um
  modified_base 19: mod_base = gm
  modified_base 20: mod_base = um
  modified_base 21: mod_base = OTHER; note = 2'-O-methyladenosine-phosphorothioate-inverted abasic deoxyribonucleotide
  source 1..21: mol_type = other RNA
caggtgtttattggctttgta

SEQ ID NO: 878 - RNA, 21 nt, synthetic construct
  modified_base 1: mod_base = OTHER; note = 5'-6-(16-hydroxyhexadecanamido)hexyl phosphorothioate-inverted abasic deoxyribonucleotide-phosphorothioate-2'-O-methylcytidine
  modified_base 2: mod_base = OTHER; note = 2'-O-methyladenosine
  modified_base 3: mod_base = gm
  modified_base 4: mod_base = gm
  modified_base 5: mod_base = um
  modified_base 6: mod_base = gm
  modified_base 7: mod_base = um
  modified_base 8: mod_base = um
  modified_base 9: mod_base = OTHER; note = 2'-fluorouridine
  modified_base 10: mod_base = OTHER; note = 2'-O-methyladenosine
  modified_base 11: mod_base = OTHER; note = 2'-fluorouridine
  modified_base 12: mod_base = OTHER; note = 2'-fluorouridine
  modified_base 13: mod_base = gm
  modified_base 14: mod_base = gm
  modified_base 15: mod_base = cm
  modified_base 16: mod_base = um
  modified_base 17: mod_base = um
  modified_base 18: mod_base = um
  modified_base 19: mod_base = gm
  modified_base 20: mod_base = um
  modified_base 21: mod_base = OTHER; note = 2'-O-methyladenosine-phosphorothioate-inverted abasic deoxyribonucleotide
  source 1..21: mol_type = other RNA
caggtgtttattggctttgta

SEQ ID NO: 879 - RNA, 21 nt, synthetic construct
  source 1..21: mol_type = other RNA
tacaacgagactgaattgcct

SEQ ID NO: 880 - RNA, 21 nt, synthetic construct
  source 1..21: mol_type = other RNA
agatcattcaacttgctccag

SEQ ID NO: 881 - RNA, 21 nt, synthetic construct
  source 1..21: mol_type = other RNA
tactaagtgagtcttgcatgg

SEQ ID NO: 882 - RNA, 23 nt, synthetic construct
  source 1..23: mol_type = other RNA
tatcagcttttccagggtcgccg

SEQ ID NO: 883 - RNA, 21 nt, synthetic construct
  source 1..21: mol_type = other RNA
tgactcgaaagccttcatcag

SEQ ID NO: 884 - RNA, 21 nt, synthetic construct
  source 1..21: mol_type = other RNA
tgatcattcaacttgctccag

SEQ ID NO: 885 - RNA, 21 nt, synthetic construct
  modified_base 1: mod_base = i
  source 1..21: mol_type = other RNA
ngatcattcaacttgctccag

SEQ ID NO: 886 - RNA, 21 nt, synthetic construct
  source 1..21: mol_type = other RNA
agatcattcaatttgctccag

SEQ ID NO: 887 - RNA, 21 nt, synthetic construct
  source 1..21: mol_type = other RNA
agatcattcaacttgttccag

SEQ ID NO: 888 - RNA, 21 nt, synthetic construct
  source 1..21: mol_type = other RNA
tacaatgagactgaattgcct

SEQ ID NO: 889 - RNA, 21 nt, synthetic construct
  source 1..21: mol_type = other RNA
tactaagtgagttttgcatgg

SEQ ID NO: 890 - RNA, 21 nt, synthetic construct
  source 1..21: mol_type = other RNA
tactaagtgagtcttgtatgg

SEQ ID NO: 891 - RNA, 21 nt, synthetic construct
  source 1..21: mol_type = other RNA
agattattcaacttgctccag

SEQ ID NO: 892 - RNA, 21 nt, synthetic construct
  source 1..21: mol_type = other RNA
aggaattccaatgatctgttt

SEQ ID NO: 893 - RNA, 21 nt, synthetic construct
  source 1..21: mol_type = other RNA
tttctgacagacataatcaca

SEQ ID NO: 894 - RNA, 21 nt, synthetic construct
  source 1..21: mol_type = other RNA
tgtaaaagcagaacctgagcg

SEQ ID NO: 895 - RNA, 21 nt, synthetic construct
  source 1..21: mol_type = other RNA
ttcatcagcttttccagggtc

SEQ ID NO: 896 - RNA, 21 nt, synthetic construct
  source 1..21: mol_type = other RNA
aggccttcatcagcttttcca

SEQ ID NO: 897 - RNA, 21 nt, synthetic construct
  source 1..21: mol_type = other RNA
tgactcgaaggccttcatcag

SEQ ID NO: 898 - RNA, 21 nt, synthetic construct
  source 1..21: mol_type = other RNA
tacttgagggactcgaaggcc

SEQ ID NO: 899 - RNA, 21 nt, synthetic construct
  source 1..21: mol_type = other RNA
tgacttgagggactcgaaggc

SEQ ID NO: 900 - RNA, 21 nt, synthetic construct
  source 1..21: mol_type = other RNA
agaaaaagttccatagcgatg

SEQ ID NO: 901 - RNA, 21 nt, synthetic construct
  source 1..21: mol_type = other RNA
aagattagaatccatcaaagc

SEQ ID NO: 902 - RNA, 21 nt, synthetic construct
  source 1..21: mol_type = other RNA
tttggaagattagaatccatc

SEQ ID NO: 903 - RNA, 21 nt, synthetic construct
  source 1..21: mol_type = other RNA
ttgtcatttgcaaaattgcca

SEQ ID NO: 904 - RNA, 21 nt, synthetic construct
  source 1..21: mol_type = other RNA
ttgtgtatgatgtaacgtcag

SEQ ID NO: 905 - RNA, 21 nt, synthetic construct
  source 1..21: mol_type = other RNA
acaacattgtggtcttggtgc

SEQ ID NO: 906 - RNA, 21 nt, synthetic construct
  source 1..21: mol_type = other RNA
tctataagttccacaatactc

SEQ ID NO: 907 - RNA, 21 nt, synthetic construct
  source 1..21: mol_type = other RNA
tcatgatcgatgtagttcaag

SEQ ID NO: 908 - RNA, 21 nt, synthetic construct
  source 1..21: mol_type = other RNA
tacaaagcttcacagcatcca

SEQ ID NO: 909 - RNA, 21 nt, synthetic construct
  source 1..21: mol_type = other RNA
tacttgttgtaacaggacctg

SEQ ID NO: 910 - RNA, 21 nt, synthetic construct
  source 1..21: mol_type = other RNA
ttgatgaggatttacttgttg

SEQ ID NO: 911 - RNA, 21 nt, synthetic construct
  source 1..21: mol_type = other RNA
acaaacagttgccatcattgg

SEQ ID NO: 912 - RNA, 21 nt, synthetic construct
  source 1..21: mol_type = other RNA
tacaaagccaataaacacctg

SEQ ID NO: 913 - RNA, 21 nt, synthetic construct
  source 1..21: mol_type = other RNA
tatctgtcgagacagtcgctt

SEQ ID NO: 914 - RNA, 21 nt, synthetic construct
  source 1..21: mol_type = other RNA
tagttgaacagtgctcacgga

SEQ ID NO: 915 - RNA, 21 nt, synthetic construct
  source 1..21: mol_type = other RNA
tactaagtaactttgtgctgg

SEQ ID NO: 916 - RNA, 21 nt, synthetic construct
  source 1..21: mol_type = other RNA
tcacattccaagtttggctgc

SEQ ID NO: 917 - RNA, 21 nt, synthetic construct
  source 1..21: mol_type = other RNA
tgtactatttctctattgcac

SEQ ID NO: 918 - RNA, 21 nt, synthetic construct
  source 1..21: mol_type = other RNA
tagtcatggaggttctgacag

SEQ ID NO: 919 - RNA, 21 nt, synthetic construct
  source 1..21: mol_type = other RNA
tgaatgtgatttacaatgagc

SEQ ID NO: 920 - RNA, 21 nt, synthetic construct
  source 1..21: mol_type = other RNA
tactgatgaagtcctgtactg

SEQ ID NO: 921 - RNA, 21 nt, synthetic construct
  source 1..21: mol_type = other RNA
ttgagttcttccattggcaac

SEQ ID NO: 922 - RNA, 21 nt, synthetic construct
  source 1..21: mol_type = other RNA
tcagaaatttcactcatccct

SEQ ID NO: 923 - RNA, 21 nt, synthetic construct
  source 1..21: mol_type = other RNA
tcatcagcttttccagggtcg

SEQ ID NO: 924 - RNA, 21 nt, synthetic construct
  source 1..21: mol_type = other RNA
tactcgaaggccttcatcagc

SEQ ID NO: 925 - RNA, 21 nt, synthetic construct
  source 1..21: mol_type = other RNA
ttttctttggtcggtgcagcg

SEQ ID NO: 926 - RNA, 21 nt, synthetic construct
  source 1..21: mol_type = other RNA
tctttctttggtcggtgcagc

SEQ ID NO: 927 - RNA, 21 nt, synthetic construct
  source 1..21: mol_type = other RNA
ttctttctttggtcggtgcag

SEQ ID NO: 928 - RNA, 21 nt, synthetic construct
  modified_base 7: mod_base = OTHER; note = thymine
  source 1..21: mol_type = other RNA
tcatgatcgatgtagttcaag

SEQ ID NO: 929 - RNA, 21 nt, synthetic construct
  modified_base 2: mod_base = OTHER; note = thymine
  source 1..21: mol_type = other RNA
ttgtgtatgatgtaacgtcag

SEQ ID NO: 930 - RNA, 21 nt, synthetic construct
  modified_base 12: mod_base = OTHER; note = thymine
  source 1..21: mol_type = other RNA
tacaaagccaataaacacctg

SEQ ID NO: 931 - RNA, 21 nt, synthetic construct
  source 1..21: mol_type = other RNA
ctgacgttacatcatacacaa

SEQ ID NO: 932 - RNA, 21 nt, synthetic construct
  source 1..21: mol_type = other RNA
cttgaactacatcgatcatga

SEQ ID NO: 933 - RNA, 21 nt, synthetic construct
  source 1..21: mol_type = other RNA
caggtgtttattggctttgta

SEQ ID NO: 934 - RNA, 21 nt, synthetic construct
  source 1..21: mol_type = other RNA
aggcaattcagtctcgttgta

SEQ ID NO: 935 - RNA, 21 nt, synthetic construct
  source 1..21: mol_type = other RNA
gcgaccctggaaaagctgata

SEQ ID NO: 936 - RNA, 21 nt, synthetic construct
  source 1..21: mol_type = other RNA
ctgatgaaggctttcgagtca

SEQ ID NO: 937 - RNA, 21 nt, synthetic construct
  source 1..21: mol_type = other RNA
ctggagcaagttgaatgatca

SEQ ID NO: 938 - RNA, 21 nt, synthetic construct
  source 1..21: mol_type = other RNA
ctggagcaagttgaatgatct

SEQ ID NO: 939 - RNA, 21 nt, synthetic construct
  source 1..21: mol_type = other RNA
ctggagcaagttgaatgattt

SEQ ID NO: 940 - RNA, 21 nt, synthetic construct
  source 1..21: mol_type = other RNA
aggcaattcagtcttgttgta

SEQ ID NO: 941 - RNA, 21 nt, synthetic construct
  source 1..21: mol_type = other RNA
aggtaattcagtctcgttgta

SEQ ID NO: 942 - RNA, 21 nt, synthetic construct
  source 1..21: mol_type = other RNA
aggcaattcagtttcgttgta

SEQ ID NO: 943 - RNA, 21 nt, synthetic construct
  source 1..21: mol_type = other RNA
ccatgcaagactcacttagta

SEQ ID NO: 944 - RNA, 21 nt, synthetic construct
  source 1..21: mol_type = other RNA
ccatgtaagactcacttagta

SEQ ID NO: 945 - RNA, 21 nt, synthetic construct
  source 1..21: mol_type = other RNA
ccatgcaagactcatttagta

SEQ ID NO: 946 - RNA, 21 nt, synthetic construct
  source 1..21: mol_type = other RNA
ccatgcaagacttacttagta

SEQ ID NO: 947 - RNA, 21 nt, synthetic construct
  source 1..21: mol_type = other RNA
ctgatgaaggccttcgagtca

SEQ ID NO: 948 - RNA, 21 nt, synthetic construct
  source 1..21: mol_type = other RNA
ccagcacaaagttacttagta

SEQ ID NO: 949 - RNA, 21 nt, synthetic construct
  source 1..21: mol_type = other RNA
cagtacaggacttcatcagta

SEQ ID NO: 950 - RNA, 21 nt, synthetic construct
  source 1..21: mol_type = other RNA
ctggagcaagttgaatgatta

SEQ ID NO: 951 - RNA, 21 nt, synthetic construct
  source 1..21: mol_type = other RNA
aaacagatcattggaattcct

SEQ ID NO: 952 - RNA, 21 nt, synthetic construct
  source 1..21: mol_type = other RNA
tgtgattatgtctgtcagaaa

SEQ ID NO: 953 - RNA, 21 nt, synthetic construct
  source 1..21: mol_type = other RNA
cgctcaggttctgcttttaca

SEQ ID NO: 954 - RNA, 21 nt, synthetic construct
  source 1..21: mol_type = other RNA
gaccctggaaaagctgatgaa

SEQ ID NO: 955 - RNA, 21 nt, synthetic construct
  source 1..21: mol_type = other RNA
tggaaaagctgatgaaggcct

SEQ ID NO: 956 - RNA, 21 nt, synthetic construct
  source 1..21: mol_type = other RNA
ggccttcgagtccctcaagta

SEQ ID NO: 957 - RNA, 21 nt, synthetic construct
  source 1..21: mol_type = other RNA
gccttcgagtccctcaagtca

SEQ ID NO: 958 - RNA, 21 nt, synthetic construct
  source 1..21: mol_type = other RNA
catcgctatggaactttttct

SEQ ID NO: 959 - RNA, 21 nt, synthetic construct
  source 1..21: mol_type = other RNA
gctttgatggattctaatctt

SEQ ID NO: 960 - RNA, 21 nt, synthetic construct
  source 1..21: mol_type = other RNA
gatggattctaatcttccaaa

SEQ ID NO: 961 - RNA, 21 nt, synthetic construct
  source 1..21: mol_type = other RNA
tggcaattttgcaaatgacaa

SEQ ID NO: 962 - RNA, 21 nt, synthetic construct
  source 1..21: mol_type = other RNA
gcaccaagaccacaatgttgt

SEQ ID NO: 963 - RNA, 21 nt, synthetic construct
  source 1..21: mol_type = other RNA
gagtattgtggaacttataga

SEQ ID NO: 964 - RNA, 21 nt, synthetic construct
  source 1..21: mol_type = other RNA
tggatgctgtgaagctttgta

SEQ ID NO: 965 - RNA, 21 nt, synthetic construct
  source 1..21: mol_type = other RNA
caggtcctgttacaacaagta

SEQ ID NO: 966 - RNA, 21 nt, synthetic construct
  source 1..21: mol_type = other RNA
caacaagtaaatcctcatcaa

SEQ ID NO: 967 - RNA, 21 nt, synthetic construct
  source 1..21: mol_type = other RNA
ccaatgatggcaactgtttgt

SEQ ID NO: 968 - RNA, 21 nt, synthetic construct
  source 1..21: mol_type = other RNA
aagcgactgtctcgacagata

SEQ ID NO: 969 - RNA, 21 nt, synthetic construct
  source 1..21: mol_type = other RNA
tccgtgagcactgttcaacta

SEQ ID NO: 970 - RNA, 21 nt, synthetic construct
  source 1..21: mol_type = other RNA
gcagccaaacttggaatgtga

SEQ ID NO: 971 - RNA, 21 nt, synthetic construct
  source 1..21: mol_type = other RNA
gtgcaatagagaaatagtaca

SEQ ID NO: 972 - RNA, 21 nt, synthetic construct
  source 1..21: mol_type = other RNA
ctgtcagaacctccatgacta

SEQ ID NO: 973 - RNA, 21 nt, synthetic construct
  source 1..21: mol_type = other RNA
gctcattgtaaatcacattca

SEQ ID NO: 974 - RNA, 21 nt, synthetic construct
  source 1..21: mol_type = other RNA
gttgccaatggaagaactcaa

SEQ ID NO: 975 - RNA, 21 nt, synthetic construct
  source 1..21: mol_type = other RNA
agggatgagtgaaatttctga

SEQ ID NO: 976 - RNA, 21 nt, synthetic construct
  modified_base 17: mod_base = i
  source 1..21: mol_type = other RNA
cgaccctggaaaagctnatga

SEQ ID NO: 977 - RNA, 21 nt, synthetic construct
  modified_base 17: mod_base = i
  source 1..21: mol_type = other RNA
gctgatgaaggccttcnagta

SEQ ID NO: 978 - RNA, 21 nt, synthetic construct
  source 1..21: mol_type = other RNA
cgctgcaccgaccaaagaaaa

SEQ ID NO: 979 - RNA, 21 nt, synthetic construct
  source 1..21: mol_type = other RNA
gctgcaccgaccaaagaaaga

SEQ ID NO: 980 - RNA, 21 nt, synthetic construct
  source 1..21: mol_type = other RNA
ctgcaccgaccaaagaaagaa

1-78. (canceled)

79. A conjugate, or a pharmaceutically acceptable salt thereof, comprising an RNAi agent and an antibody fragment (Fab), wherein the conjugate comprises:
i. an antisense strand comprising the nucleotide sequence (5′ to 3′) cPrpusAfscaAfcgagacUfgAfaUfugccssu (SEQ ID NO: 468), and
ii. a sense strand comprising Fab0070-L1026-C6s(invAb)saggcaauuCfaGfuCfucguuguas(invAb) (5′ to 3′) (SEQ ID NO: 821);
wherein:
(a) a represents 2′-O-methyl adenosine, c represents 2′-O-methyl cytidine, g represents 2′-O-methyl guanosine, u represents 2′-O-methyl uridine, Af represents 2′-fluoro adenosine, Cf represents 2′-fluoro cytidine, Gf represents 2′-fluoro guanosine, Uf represents 2′-fluoro uridine, s represents a phosphorothioate linkage, and ss represents a phosphorodithioate linkage;
(b) cPrpus represents [chemical structure]
(c) (invAb) represents
linkage towards 5′ end [chemical structure]
(d) (invAb)s represents
linkage towards 5′ end [chemical structure]
(e) C6s represents [chemical structure]
(f) L1026 represents [chemical structure]
and
(g) Fab0070 represents the antibody fragment (Fab), and wherein the antibody fragment comprises:
A. a variable light chain (VL) comprising: a VL complementary determining region (CDR) 1 having an amino acid sequence of RASDKLYSNLA (SEQ ID NO: 8), a VL CDR2 having an amino acid sequence of DATLLAS (SEQ ID NO: 9), and a VL CDR3 having an amino acid sequence of QHFWGTPLT (SEQ ID NO: 15); and
B. a variable heavy chain (VH) comprising: a VH CDR1 having an amino acid sequence of GFTFTSYWMH (SEQ ID NO: 18), a VH CDR2 having an amino acid sequence of EINPTNGRTNYIEKFKS (SEQID NO: 23), and VH CDR3 having an amino acid sequence of GTRAYHY (SEQ ID NO: 25);
wherein [symbol] the indicates a point of connection.

80. The conjugate or a pharmaceutically acceptable salt thereof of claim 79, wherein the antisense strand consists of the nucleotide sequence (5′ to 3′) cPrpusAfscaAfcgagacUfgAfaUfugccssu (SEQ ID NO: 468).

81. The conjugate or a pharmaceutically acceptable salt thereof of claim 79, wherein:
A. the variable light chain of the Fab consists of an amino acid sequence
(SEQ IDNO: 32)
DIQLTQSPSSLSASVGDRVTITCRASDKLYSNLAWYQQKPGKAPKLLIYD
ATLLASGVPSRFSGSGSGTDYTLTISSLQPEDFATYYCQHFWGTPLTFGQ
GTKVEIK,
and
B. the variable heavy chain of the Fab consists of an amino acid sequence
(SEQ ID NO: 40)
EVQLVESGGGLVQPGGSLRLSCATSGFTFTSYWMHWVRQAPGKGLE
WVAEINPTNGRTNYIEKFKSRITLSVDKSKSTVYLQMNSLRAEDTA
VYYCARGTRAYHYWGQGTLVTVSS.

82. The conjugate or a pharmaceutically acceptable salt thereof of claim 79, wherein:
A. the light chain of the Fab comprises an amino acid sequence
(SEQ ID NO: 3)
DIQLTQSPSSLSASVGDRVTITCRASDKLYSNLAWYQQKPGKAPKLLIYD
ATLLASGVPSRFSGSGSGTDYTLTISSLQPEDFATYYCQHFWGTPLTFGQ
GTKVEIKRTVAAPSVFIFPPSDEQLKSGTASVVCLLNNFYPREAKVQWKV
DNALQSGNSQESVTEQDSKDSTYSLSSTLTLSKADYEKHKVYACEVTHQG
LSSPVTKSFNRGEC,
and
B. the heavy chain of the Fab comprises an amino acid sequence
(SEQ ID NO: 5)
EVQLVESGGGLVQPGGSLRLSCATSGFTFTSYWMHWVRQAPGKGLE
WVAEINPTNGRTNYIEKFKSRITLSVDKSKSTVYLQMNSLRAEDTA
VYYCARGTRAYHYWGQGTLVTVSSASTKGPSVFPLAPSSKSTSGGT
AALGCLVKDYFPEPVTVSWNSGALTSGVHTFPAVLQSSGLYSLSSV
VTVPSSSLGTQTYICNVNHKPSNTKVDKRVEPKSCDKTH.

83. The conjugate of claim 79, wherein the conjugate is [chemical structure] [chemical structure] [chemical structure] [chemical structure] [chemical structure] [chemical structure]
or a pharmaceutically acceptable salt thereof.

84. The conjugate of claim 79, wherein the conjugate is [chemical structure] [chemical structure] [chemical structure] [chemical structure] [chemical structure] [chemical structure]
or a pharmaceutically acceptable salt thereof.

85. A composition comprising:
I. a conjugate, or a pharmaceutically acceptable salt thereof, comprising an RNAi agent and an antibody fragment (Fab), wherein the conjugate comprises:
i. an antisense strand comprising the nucleotide sequence (5′ to 3′) cPrpusAfscaAfcgagacUfgAfaUfugeessu (SEQ ID NO: 468), and
ii. a sense strand comprising Fab0070-L1026-C6s(invAb)saggcaauuCfaGfuCfucguuguas(invAb) (5′ to 3′) (SEQ ID NO: 821);
wherein:
(a) a represents 2′-O-methyl adenosine, c represents 2′-O-methyl cytidine, g represents 2′-O-methyl guanosine, u represents 2′-O-methyl uridine, Af represents 2′-fluoro adenosine, Cf represents 2′-fluoro cytidine, Gf represents 2′-fluoro guanosine, Uf represents 2′-fluoro uridine, s represents a phosphorothioate linkage, and ss represents a phosphorodithioate linkage;
(b) cPrpus represents [chemical structure]
(c) (invAb) represents
linkage towards 5′ end [chemical structure]
(d) (invAb)s represents
linkage towards 5′ end [chemical structure]
(e) C6s represents [chemical structure]
(f) L1026 represents [chemical structure]
and
(g) Fab0070 represents the antibody fragment (Fab), and wherein the antibody fragment comprises:
A. a variable light chain (VL) comprising: a VL complementary determining region (CDR) 1 having an amino acid sequence of RASDKLYSNLA (SEQ ID NO: 8), a VL CDR2 having an amino acid sequence of DATLLAS (SEQ ID NO: 9), and a VL CDR3 having an amino acid sequence of QHFWGTPLT (SEQ ID NO: 15); and
B. a variable heavy chain (VH) comprising: a VH CDR1 having an amino acid sequence of GFTFTSYWMH (SEQ ID NO: 18), a VH CDR2 having an amino acid sequence of EINPTNGRTNYIEKFKS (SEQID NO: 23), and VH CDR3 having an amino acid sequence of GTRAYHY (SEQ ID NO: 25);
wherein the [symbol] indicates a point of connection; and
II. a pharmaceutically acceptable excipient.

86. The composition of claim 85, wherein the antisense strand consists of the nucleotide sequence (5′ to 3′) cPrpusAfscaAfcgagacUfgAfaUfugccssu (SEQ ID NO: 468).

87. The composition of claim 85, wherein:
A. the variable light chain of the Fab consists of an amino acid sequence
(SEQ IDNO: 32)
DIQLTQSPSSLSASVGDRVTITCRASDKLYSNLAWYQQKPGKAPKLLIYD
ATLLASGVPSRFSGSGSGTDYTLTISSLQPEDFATYYCQHFWGTPLTFGQ
GTKVEIK,
and
B. the variable heavy chain of the Fab consists of an amino acid sequence
(SEQ ID NO: 40)
EVQLVESGGGLVQPGGSLRLSCATSGFTFTSYWMHWVRQAPGKGLEWVAE
INPTNGRTNYIEKFKSRITLSVDKSKSTVYLQMNSLRAEDTAVYYCARGT
RAYHYWGQGTLVTVSS.

88. The composition of claim 85, wherein:
A. the light chain of the Fab comprises an amino acid sequence
(SEQ ID NO: 3)
DIQLTQSPSSLSASVGDRVTITCRASDKLYSNLAWYQQKPGKAPKL
LIYDATLLASGVPSRFSGSGSGTDYTLTISSLQPEDFATYYCQHFW
GTPLTFGQGTKVEIKRTVAAPSVFIFPPSDEQLKSGTASVVCLLNN
FYPREAKVQWKVDNALQSGNSQESVTEQDSKDSTYSLSSTLTLSKA
DYEKHKVYACEVTHQGLSSPVTKSFNRGEC,
and
B. the heavy chain of the Fab comprises an amino acid sequence
(SEQ ID NO: 5)
EVQLVESGGGLVQPGGSLRLSCATSGFTFTSYWMHWVRQAPGKGLE
WVAEINPTNGRTNYIEKFKSRITLSVDKSKSTVYLQMNSLRAEDTA
VYYCARGTRAYHYWGQGTLVTVSSASTKGPSVFPLAPSSKSTSGGT
AALGCLVKDYFPEPVTVSWNSGALTSGVHTFPAVLQSSGLYSLSSV
VTVPSSSLGTQTYICNVNHKPSNTKVDKRVEPKSCDKTH.

89. The composition of claim 85, wherein the conjugate is [chemical structure] [chemical structure] [chemical structure] [chemical structure] [chemical structure] [chemical structure]
or a pharmaceutically acceptable salt thereof.

90. The composition of claim 85, wherein the conjugate is [chemical structure] [chemical structure] [chemical structure] [chemical structure] [chemical structure]
or a pharmaceutically acceptable salt thereof.

91. A method for inhibiting expression of a huntingtin (HTT) gene in a cell, the method comprising introducing into the cell an effective amount of a conjugate, or a pharmaceutically acceptable salt thereof, comprising an RNAi agent and an antibody fragment (Fab), wherein the conjugate comprises:
i. an antisense strand comprising the nucleotide sequence (5′ to 3′) cPrpusAfscaAfcgagacUfgAfaUfugccssu (SEQ ID NO: 468), and
ii. a sense strand comprising Fab0070-L1026-C6s(invAb)saggcaauuCfaGfuCfucguuguas(invAb) (5′ to 3′) (SEQ ID NO: 821);
wherein:
(a) a represents 2′-O-methyl adenosine, c represents 2′-O-methyl cytidine, g represents 2′-O-methyl guanosine, u represents 2′-O-methyl uridine, Af represents 2′-fluoro adenosine, Cf represents 2′-fluoro cytidine, Gf represents 2′-fluoro guanosine, Uf represents 2′-fluoro uridine, s represents a phosphorothioate linkage, and ss represents a phosphorodithioate linkage;
(b) cPrpus represents [chemical structure]
(c) (invAb) represents [chemical structure]
(d) (invAb)s represents [chemical structure]
(e) C6s represents [chemical structure]
(f) L1026 represents [chemical structure]
(g) Fab0070 represents the antibody fragment (Fab), and wherein the antibody fragment comprises:
A. a variable light chain (VL) comprising: a VL complementary determining region (CDR) 1 having an amino acid sequence of RASDKLYSNLA (SEQ ID NO: 8), a VL CDR2 having an amino acid sequence of DATLLAS (SEQ ID NO: 9), and a VL CDR3 having an amino acid sequence of QHFWGTPLT (SEQ ID NO: 15); and
B. a variable heavy chain (VH) comprising: a VH CDR1 having an amino acid sequence of GFTFTSYWMH (SEQ ID NO: 18), a VH CDR2 having an amino acid sequence of EINPTNGRTNYIEKFKS (SEQID NO: 23), and VH CDR3 having an amino acid sequence of GTRAYHY (SEQ ID NO: 25);
wherein the [symbol] indicates a point of connection.

92. The method of claim 91, wherein the antisense strand consists of the nucleotide sequence (5′ to 3′) cPrpusAfscaAfcgagacUfgAfaUfugccssu (SEQ ID NO: 468).

93. The method of claim 91, wherein:
A. the variable light chain of the Fab consists of an amino acid sequence
(SEQ ID NO: 32)
DIQLTQSPSSLSASVGDRVTITCRASDKLYSNLAWYQQKPGKAPKL
LIYDATLLASGVPSRFSGSGSGTDYTLTISSLQPEDFATYYCQHFW
GTPLTFGQGTKVEIK,
and
B. the variable heavy chain of the Fab consists of an amino acid sequence
(SEQ ID NO: 40)
EVQLVESGGGLVQPGGSLRLSCATSGFTFTSYWMHWVRQAPGKGLE
WVAEINPTNGRTNYIEKFKSRITLSVDKSKSTVYLQMNSLRAEDTA
VYYCARGTRAYHYWGQGTLVTVSS.

94. The method of claim 91, wherein:
A. the light chain of the Fab comprises an amino acid sequence
(SEQ ID NO: 3)
DIQLTQSPSSLSASVGDRVTITCRASDKLYSNLAWYQQKPGKAPKL
LIYDATLLASGVPSRFSGSGSGTDYTLTISSLQPEDFATYYCQHFW
GTPLTFGQGTKVEIKRTVAAPSVFIFPPSDEQLKSGTASVVCLLNN
FYPREAKVQWKVDNALQSGNSQESVTEQDSKDSTYSLSSTLTLSKA
DYEKHKVYACEVTHQGLSSPVTKSFNRGEC,
and
B. the heavy chain of the Fab comprises an amino acid sequence
(SEQ ID NO: 5)
EVQLVESGGGLVQPGGSLRLSCATSGFTFTSYWMHWVRQAPGKGLE
WVAEINPTNGRTNYIEKFKSRITLSVDKSKSTVYLQMNSLRAEDTA
VYYCARGTRAYHYWGQGTLVTVSSASTKGPSVFPLAPSSKSTSGGT
AALGCLVKDYFPEPVTVSWNSGALTSGVHTFPAVLQSSGLYSLSSV
VTVPSSSLGTQTYICNVNHKPSNTKVDKRVEPKSCDKTH.

95. The method of claim 91, wherein the conjugate is [chemical structure] [chemical structure] [chemical structure] [chemical structure] [chemical structure] [chemical structure]
or a pharmaceutically acceptable salt thereof.

96. The method of claim 91, wherein the conjugate is [chemical structure] [chemical structure] [chemical structure] [chemical structure] [chemical structure] [chemical structure]
or a pharmaceutically acceptable salt thereof.

97. A method of treating one or more symptoms or diseases associated with enhanced or elevated mutant huntingtin (HTT) activity levels, the method comprising administering to a human subject in need thereof a therapeutically effective amount of a conjugate, or a pharmaceutically acceptable salt thereof, comprising an RNAi agent and an antibody fragment (Fab), wherein the conjugate comprises:
i. an antisense strand comprising the nucleotide sequence (5′ to 3′) cPrpusAfscaAfcgagacUfgAfaUfugccssu (SEQ ID NO: 468), and
ii. a sense strand comprising Fab0070-L1026-C6s(invAb)saggcaauuCfaGfuCfucguuguas(invAb) (5′ to 3′) (SEQ ID NO: 821);
wherein:
(a) a represents 2′-O-methyl adenosine, c represents 2′-O-methyl cytidine, g represents 2′-O-methyl guanosine, u represents 2′-O-methyl uridine, Af represents 2′-fluoro adenosine, Cf represents 2′-fluoro cytidine, Gf represents 2′-fluoro guanosine, Uf represents 2′-fluoro uridine, s represents a phosphorothioate linkage, and ss represents a phosphorodithioate linkage;
(b) cPrpus represents [chemical structure]
(c) (invAb) represents [chemical structure]
(d) (invAb)s represents [chemical structure]
(e) C6s represents [chemical structure]
(f) L1026 represents [chemical structure]
and
(g) Fab0070 represents the antibody fragment (Fab), and wherein the antibody fragment comprises:
A. a variable light chain (VL) comprising: a VL complementary determining region (CDR) 1 having an amino acid sequence of RASDKLYSNLA (SEQ ID NO: 8), a VL CDR2 having an amino acid sequence of DATLLAS (SEQ ID NO: 9), and a VL CDR3 having an amino acid sequence of QHFWGTPLT (SEQ ID NO: 15); and
B. a variable heavy chain (VH) comprising: a VH CDR1 having an amino acid sequence of GFTFTSYWMH (SEQ ID NO: 18), a VH CDR2 having an amino acid sequence of EINPTNGRTNYIEKFKS (SEQID NO: 23), and VH CDR3 having an amino acid sequence of GTRAYHY (SEQ ID NO: 25);
wherein the [symbol] indicates a point of connection.

98. The method of claim 97, wherein the antisense strand consists of the nucleotide sequence (5′ to 3′) cPrpusAfscaAfcgagacUfgAfaUfugccssu (SEQ ID NO: 468).

99. The method of claim 97, wherein:
A. the variable light chain of the Fab consists of an amino acid sequence
(SEQ ID NO: 32)
DIQLTQSPSSLSASVGDRVTITCRASDKLYSNLAWYQQKPGKAPKL
LIYDATLLASGVPSRFSGSGSGTDYTLTISSLQPEDFATYYCQHFW
GTPLTFGQGTKVEIK,
and
B. the variable heavy chain of the Fab consists of an amino acid sequence
(SEQ ID NO: 40)
EVQLVESGGGLVQPGGSLRLSCATSGFTFTSYWMHWVRQAPGKGLE
WVAEINPTNGRTNYIEKFKSRITLSVDKSKSTVYLQMNSLRAEDTA
VYYCARGTRAYHYWGQGTLVTVSS.

100. The method of claim 97, wherein:
A. the light chain of the Fab comprises an amino acid sequence
(SEQ ID NO: 3)
DIQLTQSPSSLSASVGDRVTITCRASDKLYSNLAWYQQKPGKAPKL
LIYDATLLASGVPSRFSGSGSGTDYTLTISSLQPEDFATYYCQHFW
GTPLTFGQGTKVEIKRTVAAPSVFIFPPSDEQLKSGTASVVCLLNN
FYPREAKVQWKVDNALQSGNSQESVTEQDSKDSTYSLSSTLTLSKA
DYEKHKVYACEVTHQGLSSPVTKSFNRGEC,
and
B. the heavy chain of the Fab comprises an amino acid sequence
(SEQ ID NO: 5)
EVQLVESGGGLVQPGGSLRLSCATSGFTFTSYWMHWVRQAPGKGLE
WVAEINPTNGRTNYIEKFKSRITLSVDKSKSTVYLQMNSLRAEDTA
VYYCARGTRAYHYWGQGTLVTVSSASTKGPSVFPLAPSSKSTSGGT
AALGCLVKDYFPEPVTVSWNSGALTSGVHTFPAVLQSSGLYSLSSV
VTVPSSSLGTQTYICNVNHKPSNTKVDKRVEPKSCDKTH.

101. The method of claim 97, wherein the conjugate is [chemical structure] [chemical structure] [chemical structure] [chemical structure] [chemical structure] [chemical structure]
or a pharmaceutically acceptable salt thereof.

102. The method of claim 97, wherein the conjugate is [chemical structure] [chemical structure] [chemical structure] [chemical structure] [chemical structure] [chemical structure]
or a pharmaceutically acceptable salt thereof.
